(19) United States
(12) Patent Application Publication
(10) Pub. No.: US 2024/0175034 A1
(43) Pub. Date: May 30, 2024

(54) FN3 DOMAIN-SIRNA CONJUGATES AND USES THEREOF

(71) Applicant: ARO BIOTHERAPEUTICS COMPANY, Philadelphia, PA (US)

(72) Inventors: Swapnil Kulkarni, Philadelphia, PA (US); Thomas Zengeya, Philadelphia, PA (US); Sukumar Sakamuri, Philadelphia, PA (US); Jacqueline Lee, Philadelphia, PA (US); Steven G. Nadler, Philadelphia, PA (US); Meera Ramanujam, Philadelphia, PA (US); Karyn T. O’Neil, Philadelphia, PA (US); Stephen Anderson, Philadelphia, PA (US)

(21) Appl. No.: 18/490,450

(22) Filed: Oct. 19, 2023

Related U.S. Application Data
(60) Provisional application No. 63/380,112, filed on Oct. 19, 2022.
(60) Provisional application No. 63/505,898, filed on Jun. 2, 2023.

(51) Int. Cl. C12N 15/113; A61P 37/06

(52) U.S. Cl. CPC C12N 15/1138; A61P 37/06; C12N 2310/14; C12N 2310/312; C12N 2310/315; C12N 2310/321; C12N 2310/322; C12N 2310/3513

(57) ABSTRACT

The present disclosure relates to compositions, such as siRNA molecules and FN3 domains conjugated to the same, as well as methods of making and using the molecules.

### CROSS-REFERENCE TO RELATED APPLICATIONS

[0001] The present application claims priority to U.S. Provisional Application No. 63/380,112, filed Oct. 19, 2022, and U.S. Provisional Application No. 63/505,898, filed Jun. 2, 2023, each of which is hereby incorporated by reference in its entirety.

### REFERENCE TO AN ELECTRONIC SEQUENCE LISTING

[0002] This application contains a Sequence Listing which has been submitted electronically in XML format and is hereby incorporated by reference in its entirety. The Sequence Listing is named “ROO-032US_SL.xml”, was created on Jan. 4, 2024, and is 4,104,653 bytes in size.

### FIELD

[0003] The present embodiments relate to siRNA molecules that can be conjugated to fibronectin type III domains (FN3) and methods of making and using the molecules.

### BACKGROUND

[0004] Therapeutic nucleic acids include, e.g., small interfering RNA (siRNA), micro RNA (miRNA), antisense oligonucleotides, ribozymes, plasmids, immune stimulating nucleic acids, antisense, antagomir, antimir, microRNA mimic, supermir, U1 adaptor, and aptamer. In the case of siRNA or miRNA, these nucleic acids can downregulate intracellular levels of specific proteins through a process termed RNA interference (RNAi). The therapeutic applications of RNAi are extremely broad, since siRNA and miRNA constructs can be synthesized with any nucleotide sequence directed against a transcript of any target protein. To date, siRNA constructs have shown the ability to specifically downregulate target proteins in both in vitro and in vivo models. In addition, siRNA constructs are currently being evaluated in clinical studies and have been approved for a variety of diseases.

[0005] However, two problems currently faced by siRNA constructs are, first, their susceptibility to nuclease digestion in plasma and, second, their limited ability to gain access to the intracellular compartment where they can bind the RISC (RNA-induced Silencing Complex) when administered systemically as the free siRNA or miRNA. Certain delivery systems, such as lipid nanoparticles formed from cationic lipids with other lipid components, such as cholesterol and PEG lipids, carbohydrates (such as GalNAc trimers) have been used to facilitate the cellular uptake of the oligonucleotides. However, these have not been shown to be successful in efficiently and effectively delivering siRNA to its intended target in tissues other than the liver.

[0006] CD40 and its ligand CD40L (or CD154) are transmembrane proteins expressed by immune cells, including B cells, T cells, and dendritic cells. CD40 functions to amplify the immune response by stimulating T cells and activation and maturation of B cells. In autoimmune diseases, the role of CD40 in the activation of the immune system also includes the production of autoimmune antibodies. For example, studies have shown a role for CD40 in rheumatoid arthritis, autoimmune thyroid disease, type I diabetes, neuroinflammatory diseases such as multiple sclerosis, psoriasis, inflammatory bowel disease, systemic lupus erythematosus, and lupus nephritis (see, e.g., Zheng et al., Arthritis Res. & Therapy, 2010, 12:R13; Peters et al., Semin Immunol., 2009, 21(5):293-300; and Ripoll et al., PLoS One, 2013, 8(6):e65068).

[0007] What is needed are compositions and methods for delivering therapeutic nucleic acids, such as small interfering RNA (siRNA), to intended cellular targets to downregulate the production and expression of CD40 in subjects suffering from autoimmune diseases. Further, what is needed is a FN3 domain with optimized properties for clinical use that can specifically bind to CD71, and methods of using such molecules for novel therapeutics that enable intracellular access via receptor-mediated internalization of CD71. The present embodiments fulfills these needs as well as others.

### SUMMARY

[0008] Provided herein are compositions comprising siRNA molecules comprising a sense strand and an antisense strand, such as those provided herein. In some embodiments, the siRNA molecule targets the CD40 gene. In some embodiments, the siRNA further comprises a linker covalently attached to the sense strand or the antisense strand of the siRNA. In some embodiments, the linker is attached to a 5′ end or a 3′ end of the sense strand or the antisense strand. In some embodiments, the siRNA molecule further comprises a vinyl phosphonate modification on the sense strand or on the antisense strand. In some embodiments, the vinyl phosphonate modification is on a 5′ end or a 3′ end of the sense strand or the antisense strand. In some embodiments, the sense strand comprises a nucleic acid sequence selected from the group consisting of SEQ ID NOs: 1890, 1893, 1941, 1942, 1944, 46-178, 312-331, 1850, 1851, 1891, 1892, 1894-1928, 1932-1940, 1943, 1945-1959, 2298, 2302, 2304, 352-356, 673-805, 939-958, 2070, 2071, 2110-2148, 2152-2179, 2300, 2306, and 2308. In some embodiments, the antisense strand comprises a nucleic acid sequence selected from the group consisting of SEQ ID NOs: 2290, 2293, 2051, 2052, 2054, 179-311, 332-351, 1960, 1961, 2000-2038, 2042-2050, 2053, 2055-2069, 2291, 2292, 2294-2297, 2299, 2303, 2305, 356-359, 806-938, 959-978, 2180, 2181, 2220-2258, 2262-2289, 2301, 2307, and 2309. In some embodiments, the siRNA molecule comprises an siRNA pair as set forth in Table 3A, Table 3B, Table 4A, Table 4B, Table 5A, or Table 5B.

[0009] In some embodiments, the composition further comprises one or more FN3 domains conjugated to the siRNA molecule. In some embodiments, the one or more FN3 domains comprises an FN3 domain that binds to CD71. In some embodiments, the FN3 domain comprises an amino acid sequence that is at least 87%%, 88%, 89%, 90%, 91%, 92%, 93%, 94%, 95%, 96%, 97%, 98%, 99% identical to, or is identical to, a sequence selected from any one of SEQ ID NOs: 570, 672, 1848, 1773, 1849, 1767, 360-569, 571-644, 663-67, 1395-1772, 1774-1766, and 1768-1847.

[0010] In some embodiments, the one or more FN3 domains comprises at least two FN3 domains linked by a peptide linker. In some embodiments, the linker comprises an amino acid sequence selected from the group consisting of SEQ ID NOs: 645-661.

[0011] Also provided herein are compositions having a formula of:

(X₁)ₙ—(X₂)_{q}—(X₃)_{y}-L-X₄;

C—(X₁)ₙ—(X₂)_{q}-L-X₄—(X₃)_{y};

(X₁)ₙ—(X₂)_{q}-L-X₄—(X₃)_{y}—C;

C—(X₁)ₙ—(X₂)_{q}-L-X₄-L-(X₃)_{y};

or (X₁)ₙ—(X₂)_{q}-L-X₄-L-(X₃)_{y}—C,

wherein: X₁ is a first FN3 domain; X₂ is a second FN3 domain; X₃ is a third FN3 domain or half-life extender molecule; L is a linker; and X₄ is a nucleic acid molecule, such as an siRNA that targets CD40, such as those provided herein. C is a polymer, such as PEG, an albumin binding protein, or an aliphatic chain that bind to serum proteins, wherein n, q, and y are each independently 0 or 1. In some embodiments, X₁, X₂, and X₃ bind to the same or different target proteins.

[0012] Also provided herein are compositions having a formula A₁-B₁, wherein A₁ has a formula of (C)ₙ-(L₁)ₜ-X_{S} and B₁ has a formula of X_{AS}-(L₂)_{q}-(F₁)_{y} or A₁ has a formula of (F₁)ₙ-(L₁)ₜ-X_{S} and B₁ has a formula of X_{AS}-(L₂)_{q}-(C)_{y}, wherein: C is a polymer, such as PEG, albumin binding protein, or an aliphatic chain that binds to serum proteins;
[0013] L₁ and L₂ are each, independently, a linker;
[0014] X_{S} is a 5′ to 3′ oligonucleotide sense strand of a double stranded siRNA molecule;
[0015] X_{AS} is a 3′ to 5′ oligonucleotide antisense strand of a double stranded siRNA molecule;
[0016] F₁ is a polypeptide comprising at least one FN3 domain;
[0017] wherein n, t, q, and y are each independently 0 or 1;
[0018] wherein X_{S} and X_{AS} form a double stranded oligonucleotide molecule to form the composition/complex that targets CD40.

[0019] In some embodiments, a method of treating an immunological disease in a subject in need thereof is provided herein, the method comprising administering to the subject a composition, such as any composition provided herein. In some embodiments, a method of reducing mRNA expression of a target gene in a cell, such as an immune cell, is provided herein, the method comprising contacting the immune cell with a composition of any composition as provided herein. In some embodiments, a method of delivering an siRNA molecule to a cell, such as an immune cell, in a subject is provided herein, the method comprising administering to the subject a pharmaceutical composition comprising any composition provided herein. In some embodiments, a method of delivering an siRNA molecule targeting CD40 to a CD71 expressing immune cell in a subject is provided herein, the method comprising administering to the subject a pharmaceutical composition comprising any composition provided herein, wherein the siRNA molecule downregulates mRNA expression of CD40 in the CD71 expressing immune cell.

[0020] Further provided herein is a method of reducing one or more serum cytokines, the method comprising administering a CD40 targeting siRNA molecule to one or more CD71 expressing immune cells. In some embodiments, the one or more serum cytokines comprises IFN-γ, IL-6, TNF-α, IL-12, IP-10, RANTES, or any combination thereof. In some embodiments, the one or more CD71 expressing immune cells comprises a B cell, a T cell, or a combination thereof.

[0021] Further provided herein is a method of selectively reducing a population of CD71 expressing immune cells, the method comprising administering a CD40 targeting siRNA molecule to a population of CD71 expressing immune cells. In some embodiments, the population of CD71 expressing immune cells comprises a B cell, a T cell, or a combination thereof.

### DESCRIPTION OF THE DRAWINGS

[0022] FIG. 1 depicts a flow chart of steps and assessed properties for in silico screening of CD40 siRNA.

[0023] FIG. 2 depicts titration curves for exemplary CD40 siRNAs in Raji cells (FIG. 2, Panel A) and A20 cells (FIG. 2, Panel B).

[0024] FIG. 3A depicts in vitro relative CD40 mRNA expression in donated human dendritic cells that have been activated and exposed to CD40 ligand, with or without treatment with an exemplary CD71 binding FN3 domain and CD40 targeting siRNA conjugate.

[0025] FIG. 3B depicts in vitro IL-12 production in donated human dendritic cells, activated or not activated, exposed to CD40 ligand or not exposed to CD40 ligand, and treated or not treated with an exemplary CD71 binding FN3 domain and CD40 targeting siRNA conjugate.

[0026] FIG. 4 depicts in vitro relative CD40 mRNA expression in donated human dendritic cells activated and treated with increasing concentrations of exemplary CD71 binding FN3 domain and CD40 targeting siRNA conjugates. CD40 mRNA expression in treated cells is normalized to mRNA expression in activated, untreated dendritic cells. As concentration (in nM) of conjugate increases, relative CD40 mRNA expression decreases across all donors.

[0027] FIG. 5 depicts in vitro relative CD40 protein expression over time in donated human dendritic cells activated and treated with exemplary CD71 binding FN3 domain and CD40 targeting siRNA conjugates, or activated and not treated (“Activation Only”). CD40 protein expression in treated cells is normalized to protein expression in activated, untreated dendritic cells.

[0028] FIG. 6 depicts in vitro cytokine production in donated dendritic cells activated and treated with exemplary CD71 binding FN3 domain and CD40 targeting siRNA conjugates, in dendritic cells activated and treated with negative control, and in dendritic cells activated and not treated.

[0029] FIG. 7 depicts in vivo serum cytokine levels in mice activated and treated with exemplary CD71 binding FN3 domain and CD40 targeting siRNA conjugates, in mice activated and treated with negative control, in mice activated and treated only with CD71 binding FN3 domain, in mice activated and treated with vehicle, and in naïve mice neither activated nor treated.

[0030] FIG. 8 depicts in vivo serum cytokine levels in mice induced with EAE, an animal disease model, and activated and treated with exemplary CD71 binding FN3 domain and CD40 targeting siRNA conjugates. Further depicted are EAE mice activated and treated with negative control, EAE mice activated and treated only with CD71 binding FN3 domain, EAE mice activated and treated with vehicle, and healthy, naïve mice neither activated nor treated.

[0031] FIG. 9 depicts in vivo frequency of B cells in draining lymph node tissue and spinal cord tissue collected from mice induced with EAE, an animal disease model, and activated and treated with exemplary CD71 binding FN3 domain and CD40 targeting siRNA conjugates. Further depicted are EAE mice activated and treated with positive control, EAE mice activated and treated with vehicle, and healthy, naïve mice neither activated nor treated.

[0032] FIG. 10 depicts in vivo frequency of dendritic cells, CD8 T cells, and CD4 T cells in spinal cord tissue collected from mice induced with EAE, an animal disease model, and activated and treated with exemplary CD71 binding FN3 domain and CD40 targeting siRNA conjugates. Further depicted are EAE mice activated and treated with positive control and EAE mice activated and treated with vehicle.

[0033] FIG. 11 depicts in vivo frequency of lymphocytes, monocytes, and macrophages in spinal cord tissue collected from mice induced with EAE, an animal disease model, and activated and treated with exemplary CD71 binding FN3 domain and CD40 targeting siRNA conjugates. Further depicted are EAE mice activated and treated with positive control and EAE mice activated and treated with vehicle.

### DETAILED DESCRIPTION

[0034] As used in this specification and the appended claims, the singular forms “a,” “an,” and “the” include plural referents unless the content clearly dictates otherwise. Thus, for example, reference to “a cell” includes a combination of two or more cells, and the like.

[0035] “Fibronectin type III domain” or “FN3 domain” refers to a polypeptide sequence occurring frequently in proteins including fibronectins, tenascin, intracellular cytoskeletal proteins, cytokine receptors and prokaryotic enzymes (Bork and Doolittle, Proc Nat Acad Sci USA 89:8990-8994, 1992; Meinke et al., J Bacteriol 175:1910-1918, 1993; Watanabe et al., J Biol Chem 265:15659-15665, 1990). Exemplary FN3 domains are the 15 different FN3 domains present in human tenascin C, the 15 different FN3 domains present in human fibronectin (FN), and non-natural synthetic FN3 domains as described for example in U.S. Pat. No. 8,278,419. Individual FN3 domains are referred to by domain number and protein name, e.g., the 3^{rd} FN3 domain of tenascin (TN3), or the 10^{th} FN3 domain of fibronectin (FN10). As used throughout, “Centyrin” also refers to an FN3 domain. Further, FN3 domains as described herein are not antibodies as they do not have the structure of a variable heavy (V_{H}) and/or light (V_{L}) chain.

[0036] “Autoimmune disease” refers to disease conditions and states wherein the immune response of an individual is directed against the individual's own constituents, resulting in an undesirable and often debilitating condition. As used herein, “autoimmune disease” is intended to further include autoimmune conditions, syndromes, and the like. Autoimmune diseases include, but are not limited to, Addison's disease, allergy, allergic rhinitis, ankylosing spondylitis, asthma, atherosclerosis, autoimmune diseases of the ear, autoimmune diseases of the eye, autoimmune atrophic gastritis, autoimmune hepatitis, autoimmune hemolytic anemia, autoimmune parotitis, autoimmune uveitis, celiac disease, primary biliary cirrhosis, benign lymphocytic angiitis, COPD, colitis, coronary heart disease, Crohn's disease, diabetes (Type I), depression, diabetes, including Type 1 and/or Type 2 diabetes, epididymitis, glomerulonephritis, Goodpasture's syndrome, Graves' disease, Guillain-Barre syndrome, Hashimoto's disease, hemolytic anemia, idiopathic thrombocytopenic purpura, inflammatory bowel disease (IBD), immune response to recombinant drug products, e.g., factor VII in hemophilia, juvenile idiopathic arthritis, systemic lupus erythematosus, lupus nephritis, male infertility, mixed connective tissue disease, multiple sclerosis, myasthenia gravis, oncology, osteoarthritis, pain, primary myxedema, pemphigus, pernicious anemia, polymyositis, psoriasis, psoriatic arthritis, reactive arthritis, rheumatic fever, rheumatoid arthritis, sarcoidosis, scleroderma, Sjögren's syndrome, spondyloarthropathies, sympathetic ophthalmia, T-cell lymphoma, T-cell acute lymphoblastic leukemia, testicular angiocentric T-cell lymphoma, thyroiditis, transplant rejection, ulcerative colitis, autoimmune uveitis, and vasculitis. Autoimmune diseases include, but are not limited to, conditions in which the tissue affected is the primary target, and in some cases, the secondary target. Such conditions include, but are not limited to, AIDS, atopic allergy, bronchial asthma, eczema, leprosy, schizophrenia, inherited depression, transplantation of tissues and organs, chronic fatigue syndrome, Alzheimer's disease, Parkinson's disease, myocardial infarction, stroke, autism, epilepsy, Arthus' phenomenon, anaphylaxis, and alcohol and drug addiction.

[0037] “Capture agent” refers to substances that bind to a particular type of cell and enable the isolation of that cell from other cells. Exemplary capture agents are magnetic beads, ferrofluids, encapsulating reagents, molecules that bind the particular cell type, and the like.

[0038] “Sample” refers to a collection of similar fluids, cells, or tissues isolated from a subject, as well as fluids, cells, or tissues present within a subject. Exemplary samples are tissue biopsies, fine needle aspirations, surgically resected tissue, organ cultures, cell cultures and biological fluids such as blood, serum and serosal fluids, plasma, lymph, urine, saliva, cystic fluid, tear drops, feces, sputum, mucosal secretions of the secretory tissues and organs, vaginal secretions, ascites fluids, fluids of the pleural, pericardial, peritoneal, abdominal and other body cavities, fluids collected by bronchial lavage, synovial fluid, liquid solutions contacted with a subject or biological source, for example, cell and organ culture medium including cell or organ conditioned medium and lavage fluids, and the like.

[0039] “Substituting,” “substituted,” “mutating,” or “mutated” refers to altering, deleting or inserting one or more amino acids or nucleotides in a polypeptide or polynucleotide sequence to generate a variant of that sequence.

[0040] “Variant” refers to a polypeptide or a polynucleotide that differs from a reference polypeptide or a reference polynucleotide by one or more modifications, for example, substitutions, insertions, or deletions.

[0041] “Specifically binds” or “specific binding” refers to the ability of an FN3 domain to bind to its target, such as CD71, with a dissociation constant (K_{D}) of about 1×10⁻⁶ M or less, for example, about 1×10⁻⁷ M or less, about 1×10⁻⁸ M or less, about 1×10⁻⁹ M or less, about 1×10⁻¹⁰ M or less, about 1×10⁻¹¹ M or less, about 1×10⁻¹² M or less, or about 1×10⁻¹³ M or less. Alternatively, “specific binding” refers to the ability of an FN3 domain to bind to its target (e.g., CD71) at least 5-fold above a negative control in standard solution ELISA assay.

[0042] Specific binding can also be demonstrated using the proteome array as described herein. In some embodiments, a negative control is an FN3 domain that does not bind CD71. In some embodiments, an FN3 domain that specifically binds CD71 may have cross-reactivity to other related antigens, for example, to the same predetermined antigen from other species (homologs), such as Macaca Fascicularis (cynomolgus monkey, cyno) or Pan troglodytes (chimpanzee).

[0043] “Library” refers to a collection of variants. The library may be composed of polypeptide or polynucleotide variants.

[0044] “Stability” refers to the ability of a molecule to maintain a folded state under physiological conditions such that it retains at least one of its normal functional activities, for example, binding to a predetermined antigen such as CD71.

[0045] “CD71” refers to human CD71 protein having the amino acid sequence of SEQ ID NOs: 3 or 4. In some embodiments, SEQ ID NO: 3 is full length human CD71 protein. In some embodiments, SEQ ID NO: 4 is the extracellular domain of human CD71.

[0046] “Tencon” refers to the synthetic fibronectin type III (FN3) domain having the consensus sequence:

(SEQ ID NO: 1)
LPAPKNLVVSEVTEDSLRLSWTAPDAAFDSFLIQYQESEKVGEAINLTV
PGSERSYDLTGLKPGTEYTVSIYGVKGGHRSNPLSAEFTT

and described in U.S. Pat. Pub. No. 2010/0216708.

[0047] “Immune cell” refers to cells of the immune system categorized as lymphocytes (T-cells, B-cells and NK cells), neutrophils, or monocytes/macrophages. Immune cells also include dendritic cells. A “dendritic cell” refers to a type of antigen-presenting cell (APC) that forms an important role in the adaptive immune system. The main function of dendritic cells is to present antigens to T lymphocytes, and to secrete cytokines that may further modulate the immune response directly or indirectly. Dendritic cells have the capacity to induce a primary immune response in inactive or resting naïve T lymphocytes.

[0048] “Vector” refers to a polynucleotide capable of being duplicated within a biological system or that can be moved between such systems. Vector polynucleotides typically contain elements, such as origins of replication, polyadenylation signal or selection markers that function to facilitate the duplication or maintenance of these polynucleotides in a biological system. Examples of such biological systems may include a cell, virus, animal, plant, and reconstituted biological systems utilizing biological components capable of duplicating a vector. The polynucleotide comprising a vector may be DNA or RNA molecules, or a hybrid of these.

[0049] “Expression vector” refers to a vector that can be utilized in a biological system or in a reconstituted biological system to direct the translation of a polypeptide encoded by a polynucleotide sequence present in the expression vector.

[0050] “Polynucleotide” refers to a synthetic molecule comprising a chain of nucleotides covalently linked by a sugar-phosphate backbone or other equivalent covalent chemistry. cDNA is a typical example of a polynucleotide.

[0051] “Polypeptide” or “protein” refers to a molecule that comprises at least two amino acid residues linked by a peptide bond to form a polypeptide. Small polypeptides of less than about 50 amino acids may be referred to as “peptides”.

[0052] “Valent” refers to the presence of a specified number of binding sites specific for an antigen in a molecule. As such, the terms “monovalent”, “bivalent”, “tetravalent”, and “hexavalent” refer to the presence of one, two, four and six binding sites, respectively, specific for an antigen in a molecule.

[0053] “Subject” includes any human or nonhuman animal. “Nonhuman animal” includes all vertebrates, e.g., mammals and non-mammals, such as nonhuman primates, sheep, dogs, cats, horses, cows, chickens, amphibians, reptiles, etc. Except when noted, the terms “patient” or “subject” are used interchangeably.

[0054] “Isolated” refers to a homogenous population of molecules (such as synthetic polynucleotides or polypeptides such as FN3 domains) which have been substantially separated and/or purified away from other components of the system the molecules are produced in, such as a recombinant cell, as well as a protein that has been subjected to at least one purification or isolation step. “Isolated FN3 domain” refers to an FN3 domain that is substantially free of other cellular material and/or chemicals and encompasses FN3 domains that are isolated to a higher purity, such as to 80%, 81%, 82%, 83%, 84%, 85%, 86%, 87%, 88%, 89%, 90%, 91%, 92%, 93%, 94%, 95%, 96%, 97%, 98%, 99% or 100% purity.

[0055] “Migration,” when used in reference to the movement of cells, means that the cells are moving from one location to another. For example, a cell (e.g., a white blood cell or an immune cell) moving from a blood vessel to a tissue can be said to be migrating from the blood vessel to the tissue. Migration can also include the process of “margination,” which refers to a cell moving from the interior of a blood vessel towards the blood vessel wall. Migration can also include adhesion of the cell to the blood vessel wall, as well as transmigration across the blood vessel wall to enter a tissue.

### Compositions

[0056] In some embodiments, a composition comprising a polypeptide, such as a polypeptide comprising an FN3 domain, linked to an oligonucleotide molecule are provided. The oligonucleotide molecule can be, for example, an siRNA molecule. In some embodiments, the FN3 domain is a CD71-binding FN3 domain as provided for herein. In some embodiments, the oligonucleotide is a CD40 siRNA that binds to a CD40 RNA, such as mRNA as provided for herein. In some embodiments, the composition further comprises a polymer as provided for herein.

[0057] In some embodiments, the siRNA molecule is a double-stranded RNAi (dsRNA) agent capable of inhibiting the expression of a target gene. The dsRNA agent comprises a sense strand (passenger strand) and an antisense strand (guide strand). In some embodiments, each strand of the dsRNA agent can range from 12-40 nucleotides in length. For example, each strand can be from 14-40 nucleotides in length, 17-37 nucleotides in length, 25-37 nucleotides in length, 27-30 nucleotides in length, 17-23 nucleotides in length, 17-21 nucleotides in length, 17-19 nucleotides in length, 19-25 nucleotides in length, 19-23 nucleotides in length, 19-21 nucleotides in length, 21-25 nucleotides in length, or 21-23 nucleotides in length.

[0058] In some embodiments, the sense strand and antisense strand typically form a duplex dsRNA. The duplex region of a dsRNA agent may be from 12-40 nucleotide pairs in length. For example, the duplex region can be from 14-40 nucleotide pairs in length, 17-30 nucleotide pairs in length, 25-35 nucleotides in length, 27-35 nucleotide pairs in length, 17-23 nucleotide pairs in length, 17-21 nucleotide pairs in length, 17-19 nucleotide pairs in length, 19-25 nucleotide pairs in length, 19-23 nucleotide pairs in length, 19-21 nucleotide pairs in length, 21-25 nucleotide pairs in length, or 21-23 nucleotide pairs in length. In another example, the duplex region is selected from 12, 13, 14, 15, 16, 17, 18, 19, 20, 21, 22, 23, 24, 25, 26, 27, 28, 29, 30, 31, 32, 33, 34, 35, 36, 37, 38, 39 or 40 nucleotide pairs in length.

[0059] In some embodiments, the dsRNA comprises one or more overhang regions and/or capping groups of dsRNA agent at the 3′ end, or 5′ end, or both ends of a strand. The overhang can be 1-10 nucleotides in length, 1-6 nucleotides in length, for instance 2-6 nucleotides in length, 1-5 nucleotides in length, 2-5 nucleotides in length, 1-4 nucleotides in length, 2-4 nucleotides in length, 1-3 nucleotides in length, 2-3 nucleotides in length, or 1-2 nucleotides in length. The overhangs can be the result of one strand being longer than the other, or the result of two strands of the same length being staggered. The overhang can form a mismatch with the target mRNA, or it can be complementary to the gene sequences being targeted, or it can be another sequence. The first and second strands can also be joined, e.g., by additional bases to form a hairpin, or by other non-base linkers.

[0060] In some embodiments, the nucleotides in the overhang region of the dsRNA agent can each independently be a modified or unmodified nucleotide including, but not limited to, 2′-sugar modified, such as 2-F, 2′-O-methyl, 2′-O-(2-methoxyethyl), 2′-O-(2-methoxyethyl), 2′-O-(2-methoxyethyl), and any combinations thereof. For example, TT (UU) can be an overhang sequence for either end on either strand. The overhang can form a mismatch with the target mRNA, or it can be complementary to the gene sequences being targeted, or it can be another sequence.

[0061] The 5′- or 3′-overhangs at the sense strand, antisense strand, or both strands of the dsRNA agent may be phosphorylated. In some embodiments, the overhang region contains two nucleotides having a phosphorothioate, phosphorodithioate, phosphonate, phosphoramidate, or mesyl phosphoramidate between the two nucleotides, where the two nucleotides can be the same or different. In one embodiment, the overhang is present at the 3′-end of the sense strand, antisense strand, or both strands. In one embodiment, this 3′-overhang is present in the antisense strand. In one embodiment, this 3′-overhang is present in the sense strand.

[0062] The dsRNA agent may comprise only a single overhang, which can strengthen the interference activity of the dsRNA, without affecting its overall stability. For example, the single-stranded overhang is located at the 3′-terminal end of the sense strand or, alternatively, at the 3′-terminal end of the antisense strand. The dsRNA may also have a blunt end, located at the 5′ end of the antisense strand (or the 3′ end of the sense strand) or vice versa. Generally, the antisense strand of the dsRNA has a nucleotide overhang at the 3′ end, and the 5′ end is blunt. While not bound by theory, the asymmetric blunt end at the 5′ end of the antisense strand and 3′ end overhang of the antisense strand favor the guide strand loading into the RNA induced silencing complex (RISC). For example, the single overhang comprises at least two, three, four, five, six, seven, eight, nine, or ten nucleotides in length.

[0063] In some embodiments, the dsRNA agent may also have two blunt ends, at both ends of the dsRNA duplex.

[0064] In some embodiments, every nucleotide in the sense strand and antisense strand of the dsRNA agent may be modified. Each nucleotide may be modified with the same or different modification, which can include one or more alterations of one or both of the non-linking phosphate oxygens and/or of one or more of the linking phosphate oxygens; alteration of a constituent of the ribose sugar, e.g., of the 2 hydroxyl on the ribose sugar; wholesale replacement of the phosphate moiety with “dephospho” linkers; modification or replacement of a naturally occurring base; and replacement or modification of the ribose-phosphate backbone.

[0065] In some embodiments, all or some of the bases in a 3′ or 5′ overhang may be modified, e.g., with a modification described herein. Modifications can include, e.g., the use of modifications at the 2′ position of the ribose sugar with modifications that are known in the art, e.g., the use of deoxyribonucleotides, 2′-deoxy-2′-fluoro (2′-F) or 2′-O-methyl (2′-OMe) modified instead of the ribosugar of the nucleobase, and modifications in the phosphate group, e.g., phosphorothioate, phosphorodithoate, phosphonate, phosphoramidate, or mesyl phosphoramidate modifications. Overhangs need not be homologous with the target sequence.

[0066] In some embodiments, each residue of the sense strand and antisense strand is independently modified with LNA, HNA, CeNA, 2′-methoxyethyl, 2′-O-methyl, 2′-O-allyl, 2′-C-allyl, 2′-deoxy, or 2′-fluoro. The strands can contain more than one modification. In one embodiment, each residue of the sense strand and antisense strand is independently modified with 2′-O-methyl or 2′-fluoro.

[0067] In some embodiments, at least two different modifications are typically present on the sense strand and antisense strand. Those two modifications may be the 2′-deoxy, 2′-O-methyl or 2′-fluoro modifications, acyclic nucleotides, or others.

[0068] In one embodiment, the sense strand and antisense strand each comprises two differently modified nucleotides selected from 2′-fluoro, 2′-O-methyl, or 2′-deoxy.

[0069] The dsRNA agent may further comprise at least one phosphorothioate, phosphorodithoate, phosphonate, phosphoramidate, mesyl phosphoramidate, or methylphosphonate internucleotide linkage. The phosphorothioate, phosphorodithoate, phosphonate, phosphoramidate, mesyl phosphoramidate, or methylphosphonate internucleotide linkage modification may occur on any nucleotide of the sense strand or antisense strand or both in any position of the strand. For instance, the internucleotide linkage modification may occur on every nucleotide on the sense strand and/or antisense strand; each internucleotide linkage modification may occur in an alternating pattern on the sense strand or antisense strand; or the sense strand or antisense strand comprises both internucleotide linkage modifications in an alternating pattern. The alternating pattern of the internucleotide linkage modification on the sense strand may be the same or different from the antisense strand, and the alternating pattern of the internucleotide linkage modification on the sense strand may have a shift relative to the alternating pattern of the internucleotide linkage modification on the antisense strand.

[0070] In some embodiments, the dsRNA agent comprises the phosphorothioate, phosphorodithoate, phosphonate, phosphoramidate, mesyl phosphoramidate, or methylphosphonate internucleotide linkage modification in the overhang region. For example, the overhang region comprises two nucleotides having a phosphorothioate, phosphorodithoate, phosphonate, phosphoramidate, mesyl phosphoramidate, or methylphosphonate internucleotide linkage between the two nucleotides. Internucleotide linkage modifications also may be made to link the overhang nucleotides with the terminal paired nucleotides within the duplex region. For example, at least 2, 3, 4, or all the overhang nucleotides may be linked through phosphorothioate, phosphorodithoate, phosphonate, phosphoramidate, mesyl phosphoramidate, or methylphosphonate internucleotide linkage, and optionally, there may be additional phosphorothioate, phosphorodithoate, phosphonate, phosphoramidate, mesyl phosphoramidate, or methylphosphonate internucleotide linkages linking the overhang nucleotide with a paired nucleotide that is next to the overhang nucleotide. For instance, there may be at least two phosphorothioate internucleotide linkages between the terminal three nucleotides, in which two of the three nucleotides are overhang nucleotides, and the third is a paired nucleotide next to the overhang nucleotide. In some embodiments, these terminal three nucleotides may be at the 3′ end of the antisense strand.

[0071] In some embodiments, the dsRNA composition is linked by a modified base or nucleoside analogue as described in U.S. Pat. No. 7,427,672, which is incorporated herein by reference. In some embodiments, the modified base or nucleoside analogue is referred to as the linker or L in formulas described herein.

[0072] In some embodiments, the modified base or nucleoside analogue has the structure as shown in Chemical Formula I and a salt thereof:

[chemical structure]

[0073] where Base represents an aromatic heterocyclic group or aromatic hydrocarbon ring group optionally having a substituent, R₁ and R₂ are identical or different, and each represent a hydrogen atom, a protective group for a hydroxyl group for nucleic acid synthesis, an alkyl group, an alkenyl group, a cycloalkyl group, an aryl group, an aralkyl group, an acyl group, a sulfonyl group, a silyl group, a phosphate group, a phosphate group protected with a protective group for nucleic acid synthesis, or —P(R₄)R₅ where R₄ and R₅ are identical or different, and each represent a hydroxyl group, a hydroxyl group protected with a protective group for nucleic acid synthesis, a mercapto group, a mercapto group protected with a protective group for nucleic acid synthesis, an amino group, an alkoxy group having 1 to 5 carbon atoms, an alkylthio group having 1 to 5 carbon atoms, a cyanoalkoxy group having 1 to 6 carbon atoms, or an amino group substituted by an alky group having 1 to 5 carbon atoms, and X denotes OMe or F.

[0074] In some embodiments, the modified base or nucleoside analogue has the structure as shown in Chemical Formula I and salts thereof, wherein R₁ is a hydrogen atom, an aliphatic acyl group, an aromatic acyl group, an aliphatic or aromatic sulfonyl group, a methyl group substituted by one to three aryl groups, a methyl group substituted by one to three aryl groups having an aryl ring substituted by a lower alkyl, lower alkoxy, halogen, or cyano group, or a silyl group.

[0075] In some embodiments, the modified base or nucleoside analogue has the structure as shown in Chemical Formula I and salts thereof, wherein R₁ is a hydrogen atom, an acetyl group, a benzoyl group, a methanesulfonyl group, a p-toluenesulfonyl group, a benzyl group, a p-methoxybenzyl group, a trityl group, a dimethoxytrityl group, a monomethoxytrityl group, or a tert-butyldiphenylsilyl group.

[0076] In some embodiments, the modified base or nucleoside analogue has the structure as shown in Chemical Formula I and salts thereof, wherein R₂ is a hydrogen atom, an aliphatic acyl group, an aromatic acyl group, an aliphatic or aromatic sulfonyl group, a methyl group substituted by one to three aryl groups, a methyl group substituted by one to three aryl groups having an aryl ring substituted by a lower alkyl, lower alkoxy, halogen, or cyano group, a silyl group, a phosphoroamidite group, a phosphonyl group, a phosphate group, or a phosphate group protected with a protective group for nucleic acid synthesis.

[0077] In some embodiments, the modified base or nucleoside analogue has the structure as shown in Chemical Formula I and salts thereof, wherein R₂ is a hydrogen atom, an acetyl group, a benzoyl group, a methanesulfonyl group, a p-toluenesulfonyl group, a benzyl group, a p-methoxybenzyl group, a tert-butyldiphenylsilyl group, —P(OC₂H₄CN)(N(i-Pr)₂), —P(OCH₃)(N(i-Pr)₂), a phosphonyl group, or a 2-chlorophenyl- or 4-chlorophenylphosphate group.

[0078] In some embodiments, the modified base or nucleoside analogue has the structure as shown in Chemical Formula I and salts thereof, wherein Base is a purin-9-yl group, a 2-oxopyrimidin-1-yl group, or a purin-9-yl group or a 2-oxopyrimidin-1-yl group having a substituent selected from the following a group: A hydroxyl group, a hydroxyl group protected with a protective group for nucleic acid synthesis, an alkoxy group having 1 to 5 carbon atoms, a mercapto group, a mercapto group protected with a protective group for nucleic acid synthesis, an alkylthio group having 1 to 5 carbon atoms, an amino group, an amino group protected with a protective group for nucleic acid synthesis, an amino group substituted by an alkyl group having 1 to 5 carbon atoms, an alkyl group having 1 to 5 carbon atoms, and a halogen atom.

[0079] In some embodiments, the modified base or nucleoside analogue has the structure as shown in Chemical Formula I and salts thereof, wherein Base is 6-aminopurin-9-yl (i.e., adeninyl), 6-aminopurin-9-yl having the amino group protected with a protective group for nucleic acid synthesis, 2,6-diaminopurin-9-yl, 2-amino-6-chloropurin-9-yl, 2-amino-6-chloropurin-9-yl having the amino group protected with a protective group for nucleic acid synthesis, 2-amino-6-fluoropurin-9-yl, 2-amino-6-fluoropurin-9-yl having the amino group protected with a protective group for nucleic acid synthesis, 2-amino-6-bromopurin-9-yl, 2-amino-6-bromopurin-9-yl having the amino group protected with a protective group for nucleic acid synthesis, 2-amino-6-hydroxypurin-9-yl (i.e., guaninyl), 2-amino-6-hydroxypurin-9-yl having the amino group protected with a protective group for nucleic acid synthesis, 6-amino-2-methoxypurin-9-yl, 6-amino-2-chloropurin-9-yl, 6-amino-2-fluoropurin-9-yl, 2,6-dimethoxypurin-9-yl, 2,6-dichloropurin-9-yl, 6-mercaptopurin-9-yl, 2-oxo-4-amino-1,2-dihydropyrimidin-1-yl (i.e., cytosinyl), 2-oxo-4-amino-1,2-dihydropyrimidin-1-yl having the amino group protected with a protective group for nucleic acid synthesis, 2-oxo-4-amino-5-fluoro-1,2-dihydropyrimidin-1-yl, 2-oxo-4-amino-5-fluoro-1,2-dihydropyrimidin-1-yl having the amino group protected with a protective group for nucleic acid synthesis, 4-amino-2-oxo-5-chloro-1,2-dihydropyrimidin-1-yl, 2-oxo-4-methoxy-1,2-dihydropyrimidin-1-yl, 2-oxo-4-mercapto-1,2-dihydropyrimidin-1-yl, 2-oxo-4-hydroxy-1,2-dihydropyrimidin-1-yl (i.e., uracinyl), 2-oxo-4-hydroxy-5-methyl-1,2-dihydropyrimidin-1-yl (i.e., thyminyl), 4-amino-5-methyl-2-oxo-1,2-dihydropyrimidin-1-yl (i.e., 5-methylcytosinyl), or 4-amino-5-methyl-2-oxo-1,2-dihydropyrimidin-1-yl having the amino group protected with a protective group for nucleic acid synthesis.

[0080] In some embodiments, the modified base or nucleoside analogue has the structure as shown in Chemical Formula IB and a salt thereof:

[chemical structure]

[0081] where Base represents an aromatic heterocyclic group or aromatic hydrocarbon ring group optionally having a substituent, R₁ and R₂ are identical or different, and each represent a hydrogen atom, a protective group for a hydroxyl group for nucleic acid synthesis, an alkyl group, an alkenyl group, a cycloalkyl group, an aryl group, an aralkyl group, an acyl group, a sulfonyl group, a silyl group, a phosphate group, a phosphate group protected with a protective group for nucleic acid synthesis, or —P(R₄)R₅ where R₄ and R₅ are identical or different, and each represent a hydroxyl group, a hydroxyl group protected with a protective group for nucleic acid synthesis, a mercapto group, a mercapto group protected with a protective group for nucleic acid synthesis, an amino group, an alkoxy group having 1 to 5 carbon atoms, an alkylthio group having 1 to 5 carbon atoms, a cyanoalkoxy group having 1 to 6 carbon atoms, or an amino group substituted by an alky group having 1 to 5 carbon atoms, R₃ represents a hydrogen atom, an alkyl group, an alkenyl group, a cycloalkyl group, an aryl group, an aralkyl group, an acyl group, a sulfonyl group, or a functional molecule unit substituent, and m denotes an integer of 0 to 2, and n denotes an integer of 0 to 3. In some embodiments, m and n are 0.

[0082] In some embodiments, the modified base or nucleoside analogue has the structure as shown in Chemical Formula IB and salts thereof, wherein R₁ is a hydrogen atom, an aliphatic acyl group, an aromatic acyl group, an aliphatic or aromatic sulfonyl group, a methyl group substituted by one to three aryl groups, a methyl group substituted by one to three aryl groups having an aryl ring substituted by a lower alkyl, lower alkoxy, halogen, or cyano group, or a silyl group.

[0083] In some embodiments, the modified base or nucleoside analogue has the structure as shown in Chemical Formula IB and salts thereof, wherein R₁ is a hydrogen atom, an acetyl group, a benzoyl group, a methanesulfonyl group, a p-toluenesulfonyl group, a benzyl group, a p-methoxybenzyl group, a trityl group, a dimethoxytrityl group, a monomethoxytrityl group, or a tert-butyldiphenylsilyl group.

[0084] In some embodiments, the modified base or nucleoside analogue has the structure as shown in Chemical Formula IB and salts thereof, wherein R₂ is a hydrogen atom, an aliphatic acyl group, an aromatic acyl group, an aliphatic or aromatic sulfonyl group, a methyl group substituted by one to three aryl groups, a methyl group substituted by one to three aryl groups having an aryl ring substituted by a lower alkyl, lower alkoxy, halogen, or cyano group, a silyl group, a phosphoroamidite group, a phosphonyl group, a phosphate group, or a phosphate group protected with a protective group for nucleic acid synthesis.

[0085] In some embodiments, the modified base or nucleoside analogue has the structure as shown in Chemical Formula IB and salts thereof, wherein R₂ is a hydrogen atom, an acetyl group, a benzoyl group, a methanesulfonyl group, a p-toluenesulfonyl group, a benzyl group, a p-methoxybenzyl group, a tert-butyldiphenylsilyl group, —P(OC₂H₄CN)(N(i-Pr)₂), —P(OCH₃)(N(i-Pr)₂), a phosphonyl group, or a 2-chlorophenyl- or 4-chlorophenylphosphate group.

[0086] In some embodiments, the modified base or nucleoside analogue has the structure as shown in Chemical Formula IB and salts thereof, wherein R₃ is a hydrogen atom, a phenoxyacetyl group, an alkyl group having 1 to 5 carbon atoms, an alkenyl group having 1 to 5 carbon atoms, an aryl group having 6 to 14 carbon atoms, a methyl group substituted by one to three aryl groups, a lower aliphatic or aromatic sulfonyl group such as a methanesulfonyl group or a p-toluenesulfonyl group, an aliphatic acyl group having 1 to 5 carbon atoms such as an acetyl group, or an aromatic acyl group such as a benzoyl group.

[0087] In some embodiments, the modified base or nucleoside analogue has the structure as shown in Chemical Formula IB and salts thereof, wherein the functional molecule unit substituent as R₃ is a fluorescent or chemiluminescent labeling molecule, a nucleic acid incision activity functional group, or an intracellular or nuclear transfer signal peptide.

[0088] In some embodiments, the modified base or nucleoside analogue has the structure as shown in Chemical Formula IB and salts thereof, wherein Base is a purin-9-yl group, a 2-oxopyrimidin-1-yl group, or a purin-9-yl group or a 2-oxopyrimidin-1-yl group having a substituent selected from the following a group: a hydroxyl group, a hydroxyl group protected with a protective group for nucleic acid synthesis, an alkoxy group having 1 to 5 carbon atoms, a mercapto group, a mercapto group protected with a protective group for nucleic acid synthesis, an alkylthio group having 1 to 5 carbon atoms, an amino group, an amino group protected with a protective group for nucleic acid synthesis, an amino group substituted by an alkyl group having 1 to 5 carbon atoms, an alkyl group having 1 to 5 carbon atoms, and a halogen atom.

[0089] In some embodiments, the modified base or nucleoside analogue has the structure as shown in Chemical Formula IB and salts thereof, wherein Base is 6-aminopurin-9-yl (i.e., adeninyl), 6-aminopurin-9-yl having the amino group protected with a protective group for nucleic acid synthesis, 2,6-diaminopurin-9-yl, 2-amino-6-chloropurin-9-yl, 2-amino-6-chloropurin-9-yl having the amino group protected with a protective group for nucleic acid synthesis, 2-amino-6-fluoropurin-9-yl, 2-amino-6-fluoropurin-9-yl having the amino group protected with a protective group for nucleic acid synthesis, 2-amino-6-bromopurin-9-yl, 2-amino-6-bromopurin-9-yl having the amino group protected with a protective group for nucleic acid synthesis, 2-amino-6-hydroxypurin-9-yl (i.e., guaninyl), 2-amino-6-hydroxypurin-9-yl having the amino group protected with a protective group for nucleic acid synthesis, 6-amino-2-methoxypurin-9-yl, 6-amino-2-chloropurin-9-yl, 6-amino-2-fluoropurin-9-yl, 2,6-dimethoxypurin-9-yl, 2,6-dichloropurin-9-yl, 6-mercaptopurin-9-yl, 2-oxo-4-amino-1,2-dihydropyrimidin-1-yl (i.e., cytosinyl), 2-oxo-4-amino-1,2-dihydropyrimidin-1-yl having the amino group protected with a protective group for nucleic acid synthesis, 2-oxo-4-amino-5-fluoro-1,2-dihydropyrimidin-1-yl, 2-oxo-4-amino-5-fluoro-1,2-dihydropyrimidin-1-yl having the amino group protected with a protective group for nucleic acid synthesis, 4-amino-2-oxo-5-chloro-1,2-dihydropyrimidin-1-yl, 2-oxo-4-methoxy-1,2-dihydropyrimidin-1-yl, 2-oxo-4-mercapto-1,2-dihydropyrimidin-1-yl, 2-oxo-4-hydroxy-1,2-dihydropyrimidin-1-yl (i.e., uracinyl), 2-oxo-4-hydroxy-5-methyl-1,2-dihydropyrimidin-1-yl (i.e., thyminyl), 4-amino-5-methyl-2-oxo-1,2-dihydropyrimidin-1-yl (i.e., 5-methylcytosinyl), or 4-amino-5-methyl-2-oxo-1,2-dihydropyrimidin-1-yl having the amino group protected with a protective group for nucleic acid synthesis.

[0090] In some embodiments, the modified base or nucleoside analogue has the structure as shown in Chemical Formula IB and salts thereof, wherein m is 0, and n is 1.

[0091] In some embodiments, the modified base or nucleoside analogue is a DNA oligonucleotide or RNA oligonucleotide analogue, containing one or two or more of one or more types of unit structures of nucleoside analogues having the structure as shown in Chemical Formula II, or a pharmacologically acceptable salt thereof, provided that a form of linking between respective nucleosides in the oligonucleotide analogue may contain one or two or more phosphorothioate bonds [—OP(O)(S—)O—], phosphorodithioate bonds [—O₂PS₂—], phosphonate bonds [—PO(OH)₂—], phosphoramidate bonds [—O═P(OH)₂—], or mesyl phosphoramidate bonds [—OP(O)(N)(SO₂)(CH₃)O—] aside from a phosphodiester bond [—OP(O₂—)O—] identical with that in a natural nucleic acid, and if two or more of one or more types of these structures are contained, Base may be identical or different between these structures:

[chemical structure]

[0092] where Base represents an aromatic heterocyclic group or aromatic hydrocarbon ring group optionally having a substituent, and X denotes OMe or F.

[0093] In some embodiments, the oligonucleotide analogue or the pharmacologically acceptable salt thereof has the structure as shown in Chemical Formula II, wherein Base is a purin-9-yl group, a 2-oxopyrimidin-1-yl group, or a purin-9-yl group or a 2-oxopyrimidin-1-yl group having a substituent selected from the following a group: a hydroxyl group, a hydroxyl group protected with a protective group for nucleic acid synthesis, an alkoxy group having 1 to 5 carbon atoms, a mercapto group, a mercapto group protected with a protective group for nucleic acid synthesis, an alkylthio group having 1 to 5 carbon atoms, an amino group, an amino group protected with a protective group for nucleic acid synthesis, an amino group substituted by an alkyl group having 1 to 5 carbon atoms, an alkyl group having 1 to 5 carbon atoms, and a halogen atom.

[0094] In some embodiments, the oligonucleotide analogue or the pharmacologically acceptable salt thereof has the structure as shown in Chemical Formula II, wherein Base is 6-aminopurin-9-yl (i.e., adeninyl), 6-aminopurin-9-yl having the amino group protected with a protective group for nucleic acid synthesis, 2,6-diaminopurin-9-yl, 2-amino-6-chloropurin-9-yl, 2-amino-6-chloropurin-9-yl having the amino group protected with a protective group for nucleic acid synthesis, 2-amino-6-fluoropurin-9-yl, 2-amino-6-fluoropurin-9-yl having the amino group protected with a protective group for nucleic acid synthesis, 2-amino-6-bromopurin-9-yl, 2-amino-6-bromopurin-9-yl having the amino group protected with a protective group for nucleic acid synthesis, 2-amino-6-hydroxypurin-9-yl (i.e., guaninyl), 2-amino-6-hydroxypurin-9-yl having the amino group protected with a protective group for nucleic acid synthesis, 6-amino-2-methoxypurin-9-yl, 6-amino-2-chloropurin-9-yl, 6-amino-2-fluoropurin-9-yl, 2,6-dimethoxypurin-9-yl, 2,6-dichloropurin-9-yl, 6-mercaptopurin-9-yl, 2-oxo-4-amino-1,2-dihydropyrimidin-1-yl (i.e., cytosinyl), 2-oxo-4-amino-1,2-dihydropyrimidin-1-yl having the amino group protected with a protective group for nucleic acid synthesis, 2-oxo-4-amino-5-fluoro-1,2-dihydropyrimidin-1-yl, 2-oxo-4-amino-5-fluoro-1,2-dihydropyrimidin-1-yl group having the amino group protected with a protective group for nucleic acid synthesis, 4-amino-2-oxo-5-chloro-1,2-dihydropyrimidin-1-yl, 2-oxo-4-methoxy-1,2-dihydropyrimidin-1-yl, 2-oxo-4-mercapto-1,2-dihydropyrimidin-1-yl, 2-oxo-4-hydroxy-1,2-dihydropyrimidin-1-yl (i.e., uracinyl), 2-oxo-4-hydroxy-5-methyl-1,2-dihydropyrimidin-1-yl (i.e., thyminyl), 4-amino-5-methyl-2-oxo-1,2-dihydropyrimidin-1-yl (i.e., 5-methylcytosinyl), or 4-amino-5-methyl-2-oxo-1,2-dihydropyrimidin-1-yl having the amino group protected with a protective group for nucleic acid synthesis.

[0095] In some embodiments, the modified base or nucleoside analogue is a DNA oligonucleotide or RNA oligonucleotide analogue, containing one or two or more of one or more types of unit structures of nucleoside analogues having the structure as shown in Chemical Formula IIB, or a pharmacologically acceptable salt thereof, provided that a form of linking between respective nucleosides in the oligonucleotide analogue may contain one or two or more phosphorothioate bonds [—OP(O)(S—)O—], phosphorodithioate bonds [—O₂PS₂—], phosphonate bonds [—PO(OH)₂—], phosphoramidate bonds [—O═P(OH)₂—], or mesyl phosphoramidate bonds [—OP(O)(N)(SO₂)(CH₃)O—] aside from a phosphodiester bond [—OP(O₂—)O—] identical with that in a natural nucleic acid, and if two or more of one or more types of these structures are contained, Base may be identical or different between these structures:

[chemical structure]

[0096] where Base represents an aromatic heterocyclic group or aromatic hydrocarbon ring group optionally having a substituent, R₃ represents a hydrogen atom, an alkyl group, an alkenyl group, a cycloalkyl group, an aryl group, an aralkyl group, an acyl group, a sulfonyl group, a silyl group, or a functional molecule unit substituent, and m denotes an integer of 0 to 2, and n denotes an integer of 0 to 3. In some embodiments, m and n are 0.

[0097] In some embodiments, the oligonucleotide analogue or the pharmacologically acceptable salt thereof has the structure as shown in Chemical Formula IIB, wherein R₁ is a hydrogen atom, an aliphatic acyl group, an aromatic acyl group, an aliphatic or aromatic sulfonyl group, a methyl group substituted by one to three aryl groups, a methyl group substituted by one to three aryl groups having an aryl ring substituted by a lower alkyl, lower alkoxy, halogen, or cyano group, or a silyl group.

[0098] In some embodiments, the oligonucleotide analogue or the pharmacologically acceptable salt thereof has the structure as shown in Chemical Formula IIB, wherein R₁ is a hydrogen atom, an acetyl group, a benzoyl group, a methanesulfonyl group, a p-toluenesulfonyl group, a benzyl group, a p-methoxybenzyl group, a trityl group, a dimethoxytrityl group, a monomethoxytrityl group, or a tert-butyldiphenylsilyl group.

[0099] In some embodiments, the oligonucleotide analogue or the pharmacologically acceptable salt thereof has the structure as shown in Chemical Formula IIB, wherein R₂ is a hydrogen atom, an aliphatic acyl group, an aromatic acyl group, an aliphatic or aromatic sulfonyl group, a methyl group substituted by one to three aryl groups, a methyl group substituted by one to three aryl groups having an aryl ring substituted by a lower alkyl, lower alkoxy, halogen, or cyano group, a silyl group, a phosphoroamidite group, a phosphonyl group, a phosphate group, or a phosphate group protected with a protective group for nucleic acid synthesis.

[0100] In some embodiments, the oligonucleotide analogue or the pharmacologically acceptable salt thereof has the structure as shown in Chemical Formula IIB, wherein R₂ is a hydrogen atom, an acetyl group, a benzoyl group, a benzyl group, a p-methoxybenzyl group, a methanesulfonyl group, a p-toluenesulfonyl group, a tert-butyldiphenylsilyl group, —P(OC₂H₄CN)(N(i-Pr)₂), —P(OCH₃)(N(i-Pr)₂), a phosphonyl group, or a 2-chlorophenyl- or 4-chlorophenylphosphate group.

[0101] In some embodiments, the oligonucleotide analogue or the pharmacologically acceptable salt thereof has the structure as shown in Chemical Formula IIB, wherein R₃ is a hydrogen atom, a phenoxyacetyl group, an alkyl group having 1 to 5 carbon atoms, an alkenyl group having 1 to 5 carbon atoms, an aryl group having 6 to 14 carbon atoms, a methyl group substituted by one to three aryl groups, a lower aliphatic or aromatic sulfonyl group such as a methanesulfonyl group or a p-toluenesulfonyl group, an aliphatic acyl group having 1 to 5 carbon atoms such as an acetyl group, or an aromatic acyl group such as a benzoyl group.

[0102] In some embodiments, the oligonucleotide analogue or the pharmacologically acceptable salt thereof has the structure as shown in Chemical Formula IIB, wherein the functional molecule unit substituent as R₃ is a fluorescent or chemiluminescent labeling molecule, a nucleic acid incision activity functional group, or an intracellular or nuclear transfer signal peptide.

[0103] In some embodiments, the oligonucleotide analogue or the pharmacologically acceptable salt thereof has the structure as shown in Chemical Formula IIB, wherein Base is a purin-9-yl group, a 2-oxopyrimidin-1-yl group, or a purin-9-yl group or a 2-oxopyrimidin-1-yl group having a substituent selected from the following a group: a group: A hydroxyl group, a hydroxyl group protected with a protective group for nucleic acid synthesis, an alkoxy group having 1 to 5 carbon atoms, a mercapto group, a mercapto group protected with a protective group for nucleic acid synthesis, an alkylthio group having 1 to 5 carbon atoms, an amino group, an amino group protected with a protective group for nucleic acid synthesis, an amino group substituted by an alkyl group having 1 to 5 carbon atoms, an alkyl group having 1 to 5 carbon atoms, and a halogen atom.

[0104] In some embodiments, the oligonucleotide analogue or the pharmacologically acceptable salt thereof has the structure as shown in Chemical Formula IIB, wherein Base is 6-aminopurin-9-yl (i.e., adeninyl), 6-aminopurin-9-yl having the amino group protected with a protective group for nucleic acid synthesis, 2,6-diaminopurin-9-yl, 2-amino-6-chloropurin-9-yl, 2-amino-6-chloropurin-9-yl having the amino group protected with a protective group for nucleic acid synthesis, 2-amino-6-fluoropurin-9-yl, 2-amino-6-fluoropurin-9-yl having the amino group protected with a protective group for nucleic acid synthesis, 2-amino-6-bromopurin-9-yl, 2-amino-6-bromopurin-9-yl having the amino group protected with a protective group for nucleic acid synthesis, 2-amino-6-hydroxypurin-9-yl (i.e., guaninyl), 2-amino-6-hydroxypurin-9-yl having the amino group protected with a protective group for nucleic acid synthesis, 6-amino-2-methoxypurin-9-yl, 6-amino-2-chloropurin-9-yl, 6-amino-2-fluoropurin-9-yl, 2,6-dimethoxypurin-9-yl, 2,6-dichloropurin-9-yl, 6-mercaptopurin-9-yl, 2-oxo-4-amino-1,2-dihydropyrimidin-1-yl (i.e., cytosinyl), 2-oxo-4-amino-1,2-dihydropyrimidin-1-yl having the amino group protected with a protective group for nucleic acid synthesis, 2-oxo-4-amino-5-fluoro-1,2-dihydropyrimidin-1-yl, 2-oxo-4-amino-5-fluoro-1,2-dihydropyrimidin-1-yl group having the amino group protected with a protective group for nucleic acid synthesis, 4-amino-2-oxo-5-chloro-1,2-dihydropyrimidin-1-yl, 2-oxo-4-methoxy-1,2-dihydropyrimidin-1-yl, 2-oxo-4-mercapto-1,2-dihydropyrimidin-1-yl, 2-oxo-4-hydroxy-1,2-dihydropyrimidin-1-yl (i.e., uracinyl), 2-oxo-4-hydroxy-5-methyl-1,2-dihydropyrimidin-1-yl (i.e., thyminyl), 4-amino-5-methyl-2-oxo-1,2-dihydropyrimidin-1-yl (i.e., 5-methylcytosinyl), or 4-amino-5-methyl-2-oxo-1,2-dihydropyrimidin-1-yl having the amino group protected with a protective group for nucleic acid synthesis.

[0105] In some embodiments, the oligonucleotide analogue or the pharmacologically acceptable salt thereof has the structure as shown in Chemical Formula IIB, wherein m is 0, and nis 1.

[0106] In some embodiments, the dsRNA agent comprises mismatch(es) with the target, within the duplex, or combinations thereof. The mismatch can occur in the overhang region or the duplex region. The base pair can be ranked on the basis of their propensity to promote dissociation or melting (e.g., on the free energy of association or dissociation of a particular pairing, the simplest approach is to examine the pairs on an individual pair basis, though next neighbor or similar analysis can also be used). In terms of promoting dissociation: A:U is preferred over G:C; G:U is preferred over G:C; and I:C is preferred over G:C (I=inosine). Mismatches, e.g., non-canonical or other than canonical pairings (as described elsewhere herein) are preferred over canonical (A:T, A:U, G:C) pairings; and pairings which include a universal base are preferred over canonical pairings.

[0107] In some embodiments, the dsRNA agent can comprise a phosphorus-containing group at the 5′-end of the sense strand or antisense strand. The 5′-end phosphorus-containing group can be 5′-end phosphate (5′-P), 5′-end phosphorothioate (5′-PS), 5′-end phosphorodithioate (5′-PS₂), 5′-end vinyl phosphonate (5′-VP), 5′-end methylphosphonate (MePhos), 5′-end mesyl phosphoramidate (5′MsPA), or 5′-deoxy-5′-C-malonyl. When the 5′-end phosphorus-containing group is 5′-end vinyl phosphonate (5′-VP), the 5′-VP can be either 5′-E-VP isomer, such as trans-vinyl phosphate or cis-vinyl phosphate, or mixtures thereof. Representative structures of these modifications can be found in, for example, U.S. Pat. No. 10,233,448, which is hereby incorporated by reference in its entirety.

[0108] In some embodiments, nucleotide analogues or synthetic nucleotide base comprise a nucleic acid with a modification at a 2′ hydroxyl group of the ribose moiety. In some instances, the modification includes an H, OR, R, halo, SH, SR, NH2, NHR, NR2, or CN, wherein R is an alkyl moiety. Exemplary alkyl moiety includes, but is not limited to, methyl, ethyl, n-propyl, iso-propyl, n-butyl, iso-butyl, tert-butyl, C₁-C₁₀ chain lengths both linear and branched. In some instances, the alkyl moiety further comprises a modification. In some instances, the modification comprises an azo group, a keto group, an aldehyde group, a carboxyl group, a nitro group, a nitroso, group, a nitrile group, a heterocycle (e.g., imidazole, hydrazine or hydroxylamino) group, an isocyanate or cyanate group, or a sulfur containing group (e.g., sulfoxide, sulfone, sulfide, and disulfide). In some instances, the alkyl moiety further comprises additional hetero atom such as O, S, N, Se and each of these hetero atoms can be further substituted with alky groups as described above. In some instances, the carbon of the heterocyclic group is substituted by a nitrogen, oxygen or sulfur. In some instances, the heterocyclic substitution includes but is not limited to, morpholino, imidazole, and pyrrolidino.

[0109] In some instances, the modification at the 2′ hydroxyl group is a 2′-O-methyl modification or a 2′-O-methoxyethyl (2′-O-MOE) modification. Exemplary chemical structures of a 2′-O-methyl modification of an adenosine molecule and 2′O-methoxyethyl modification of an uridine are illustrated below.

[chemical structure]

[0110] In some instances, the modification at the 2′ hydroxyl group is a 2′-O-aminopropyl modification in which an extended amine group comprising a propyl linker binds the amine group to the 2′ oxygen. In some instances, this modification neutralizes the phosphate derived overall negative charge of the oligonucleotide molecule by introducing one positive charge from the amine group per sugar and thereby improves cellular uptake properties due to its zwitterionic properties. An exemplary chemical structure of a 2′-O-aminopropyl nucleoside phosphoramidite is illustrated below.

[chemical structure]

[0111] In some instances, the modification at the 2′ hydroxyl group is a locked or bridged ribose modification (e.g., locked nucleic acid or LNA) in which the oxygen molecule bound at the 2′ carbon is linked to the 4′ carbon by a methylene group, thus forming a 2′-C,4′-C-oxy-methylene-linked bicyclic ribonucleotide monomer. Exemplary representations of the chemical structure of LNA are illustrated below. The representation shown to the left highlights the chemical connectivities of an LNA monomer. The representation shown to the right highlights the locked 3′-endo (3E) conformation of the furanose ring of an LNA monomer.

[chemical structure]

[0112] In some instances, the modification at the 2′ hydroxyl group comprises ethylene nucleic acids (ENA) such as for example 2′-4′-ethylene-bridged nucleic acid, which locks the sugar conformation into a C₃′-endo sugar puckering conformation. ENA are part of the bridged nucleic acids class of modified nucleic acids that also comprises LNA. Exemplary chemical structures of the ENA and bridged nucleic acids are illustrated below.

[chemical structure]

[0113] In some embodiments, additional modifications at the 2′ hydroxyl group include 2′-deoxy, 2′-deoxy-2′-fluoro, 2′-O-aminopropyl (2′-O-AP), 2′-O-dimethylaminoethyl (2′-O-DMAOE), 2′-O-dimethylaminopropyl (2′-O-DMAP), 2′-O-dimethylaminoethyloxyethyl (2′-O-DMAEOE), or 2′-O—N-methylacetamido (2′-O-NMA).

[0114] In some embodiments, nucleotide analogues comprise modified bases such as, but not limited to, 5-propynyluridine, 5-propynylcytidine, 6-methyladenine, 6-methylguanine, N, N, dimethyladenine, 2-propyladenine, 2propylguanine, 2-aminoadenine, 1-methylinosine, 3-methyluridine, 5-methylcytidine, 5-methyluridine and other nucleotides having a modification at the 5 position, 5-(2-amino) propyl uridine, 5-halocytidine, 5-halouridine, 4-acetylcytidine, 1-methyladenosine, 2-methyladenosine, 3-methylcytidine, 6-methyluridine, 2-methylguanosine, 7-methylguanosine, 2, 2-dimethylguanosine, 5-methylaminoethyluridine, 5-methyloxyuridine, deazanucleotides such as 7-deaza-adenosine, 6-azouridine, 6-azocytidine, 6-azothymidine, 5-methyl-2-thiouridine, other thio bases such as 2-thiouridine and 4-thiouridine and 2-thiocytidine, dihydrouridine, pseudouridine, queuosine, archaeosine, naphthyl and substituted naphthyl groups, any O- and N-alkylated purines and pyrimidines such as N6-methyladenosine, 5-methylcarbonylmethyluridine, uridine 5-oxyacetic acid, pyridine-4-one, pyridine-2-one, phenyl and modified phenyl groups such as aminophenol or 2, 4, 6-trimethoxy benzene, modified cytosines that act as G-clamp nucleotides, 8-substituted adenines and guanines, 5-substituted uracils and thymines, azapyrimidines, carboxyhydroxyalkyl nucleotides, carboxyalkylaminoalkyl nucleotides, and alkylcarbonylalkylated nucleotides. Modified nucleotides also include those nucleotides that are modified with respect to the sugar moiety, as well as nucleotides having sugars or analogs thereof that are not ribosyl. For example, the sugar moieties, in some cases are or be based on, mannoses, arabinoses, glucopyranoses, galactopyranoses, 4′-thioribose, and other sugars, heterocycles, or carbocycles. The term nucleotide also includes what are known in the art as universal bases. By way of example, universal bases include but are not limited to 3-nitropyrrole, 5-nitroindole, or nebularine.

[0115] In some embodiments, nucleotide analogues further comprise morpholinos, peptide nucleic acids (PNAs), methylphosphonate nucleotides, thiolphosphonate nucleotides, 2′-fluoro N3-P5′-phosphoramidites, 1′, 5′-anhydrohexitol nucleic acids (HNAs), or a combination thereof. Morpholino or phosphorodiamidate morpholino oligo (PMO) comprises synthetic molecules whose structure mimics natural nucleic acid structure by deviates from the normal sugar and phosphate structures. In some instances, the five-member ribose ring is substituted with a six member morpholino ring containing four carbons, one nitrogen and one oxygen. In some cases, the ribose monomers are linked by a phosphorodiamidate group instead of a phosphate group. In such cases, the backbone alterations remove all positive and negative charges making morpholinos neutral molecules capable of crossing cellular membranes without the aid of cellular delivery agents such as those used by charged oligonucleotides.

[chemical structure]

[0116] In some embodiments, peptide nucleic acid (PNA) does not contain sugar ring or phosphate linkage and the bases are attached and appropriately spaced by oligoglycine-like molecules, therefore, eliminating a backbone charge.

[chemical structure]

[0117] In some embodiments, one or more modifications optionally occur at the internucleotide linkage. In some instances, modified internucleotide linkage include, but is not limited to, phosphorothioates, mesyl phosphoramidate, phosphorodithioates, methylphosphonates, 5′-alkylenephosphonates, 5′-methylphosphonate, 3′-alkylene phosphonates, borontrifluoridates, borano phosphate esters and selenophosphates of 3′-5′ linkage or 2′-5′ linkage, phosphotriesters, thionoalkylphosphotriesters, hydrogen phosphonate linkages, alkyl phosphonates, alkylphosphonothioates, arylphosphonothioates, phosphoroselenoates, phosphorodiselenoates, phosphinates, phosphoramidates, 3′-alkylphosphoramidates, aminoalkylphosphoramidates, thionophosphoramidates, phosphoropiperazidates, phosphoroanilothioates, phosphoroanilidates, ketones, sulfones, sulfonamides, carbonates, carbamates, methylenehydrazos, methylenedimethylhydrazos, formacetals, thioformacetals, oximes, methyleneiminos, methylenemethyliminos, thioamidates, linkages with riboacetyl groups, aminoethyl glycine, silyl or siloxane linkages, alkyl or cycloalkyl linkages with or without heteroatoms of, for example, 1 to 10 carbons that are saturated or unsaturated and/or substituted and/or contain heteroatoms, linkages with morpholino structures, amides, polyamides wherein the bases are attached to the aza nitrogens of the backbone directly or indirectly, and combinations thereof. Phosphorothioate antisense oligonucleotides (PS ASO) are antisense oligonucleotides comprising a phosphorothioate linkage. Mesyl phosphoramidate antisense oligonucleotides (MsPA ASO) are antisense oligonucleotides comprising a mesyl phosphoramidate linkage.

[0118] In some instances, the modification is a methyl or thiol modification such as methylphosphonate, mesyl phosphoramidate, or thiolphosphonate modification. In some instances, a modified nucleotide includes, but is not limited to, 2′-fluoro N3-P5′-phosphoramidites.

[0119] In some instances, a modified nucleotide includes, but is not limited to, hexitol nucleic acid (or 1′, 5′-anhydrohexitol nucleic acids (HNA)).

[0120] In some embodiments, one or more modifications further optionally include modifications of the ribose moiety, phosphate backbone and the nucleoside, or modifications of the nucleotide analogues at the 3′ or the 5′ terminus. For example, the 3′ terminus optionally includes a 3′ cationic group, or by inverting the nucleoside at the 3′-terminus with a 3′-3′ linkage. In another alternative, the 3′-terminus is optionally conjugated with an aminoalkyl group, e.g., a 3′ C5-aminoalkyl dT. In an additional alternative, the 3′-terminus is optionally conjugated with an abasic site, e.g., with an apurinic or apyrimidinic site. In some instances, the 5′-terminus is conjugated with an aminoalkyl group, e.g., a 5′-O-alkylamino substituent. In some cases, the 5′-terminus is conjugated with an abasic site, e.g., with an apurinic or apyrimidinic site.

[0121] In some embodiments, the oligonucleotide molecule comprises one or more of the synthetic nucleotide analogues described herein. In some instances, the oligonucleotide molecule comprises 1, 2, 3, 4, 5, 6, 7, 8, 9, 10, 11, 12, 13, 14, 15, 16, 17, 18, 20, 25, or more of the synthetic nucleotide analogues described herein. In some embodiments, the synthetic nucleotide analogues include 2′-O-methyl, 2′-O-methoxyethyl (2′-O-MOE), 2′-O-aminopropyl, 2′-deoxy, 2′-deoxy-2′-fluoro, 2′-O-aminopropyl (2′-O-AP), 2′-O-dimethylaminoethyl (2′-O-DMAOE), 2′-O-dimethylaminopropyl (2′-O-DMAP), 2′-O-dimethylaminoethyloxyethyl (2′-O-DMAEOE), or 2′-O—N-methylacetamido (2′-O-NMA) modified, LNA, ENA, PNA, HNA, morpholino, methylphosphonate nucleotides, thiolphosphonate nucleotides, 2′-fluoro N3-P5′-phosphoramidites, or a combination thereof. In some instances, the oligonucleotide molecule comprises 1, 2, 3, 4, 5, 6, 7, 8, 9, 10, 11, 12, 13, 14, 15, 16, 17, 18, 20, 25, or more of the synthetic nucleotide analogues selected from 2′-O-methyl, 2′-O-methoxyethyl (2′-O-MOE), 2′-O-aminopropyl, 2′-deoxy, 2′-deoxy-2′-fluoro, 2′-O-aminopropyl (2′-O-AP), 2′-O-dimethylaminoethyl (2′-O-DMAOE), 2′-O-dimethylaminopropyl (2′-O-DMAP), 2′-O-dimethylaminoethyloxyethyl (2′-O-DMAEOE), or 2′-O—N-methylacetamido (2′-O-NMA) modified, LNA, ENA, PNA, HNA, morpholino, methylphosphonate nucleotides, thiolphosphonate nucleotides, 2′-fluoro N3-P5′-phosphoramidites, or a combination thereof. In some instances, the oligonucleotide molecule comprises 1, 2, 3, 4, 5, 6, 7, 8, 9, 10, 11, 12, 13, 14, 15, 16, 17, 18, 20, 25, or more of 2′-O-methyl modified nucleotides. In some instances, the oligonucleotide molecule comprises 1, 2, 3, 4, 5, 6, 7, 8, 9, 10, 11, 12, 13, 14, 15, 16, 17, 18, 20, 25, or more of 2′-O-methoxyethyl (2′-O-MOE) modified nucleotides. In some instances, the oligonucleotide molecule comprises 1, 2, 3, 4, 5, 6, 7, 8, 9, 10, 11, 12, 13, 14, 15, 16, 17, 18, 20, 25, or more of thiolphosphonate nucleotides.

[0122] In some instances, the oligonucleotide molecule comprises at least one of: from about 5% to about 100% modification, from about 10% to about 100% modification, from about 20% to about 100% modification, from about 30% to about 100% modification, from about 40% to about 100% modification, from about 50% to about 100% modification, from about 60% to about 100% modification, from about 70% to about 100% modification, from about 80% to about 100% modification, and from about 90% to about 100% modification. In some instances, the oligonucleotide molecule comprises 100% modification.

[0123] In some cases, the oligonucleotide molecule comprises at least one of: from about 10% to about 90% modification, from about 20% to about 90% modification, from about 30% to about 90% modification, from about 40% to about 90% modification, from about 50% to about 90% modification, from about 60% to about 90% modification, from about 70% to about 90% modification, and from about 80% to about 100% modification.

[0124] In some cases, the oligonucleotide molecule comprises at least one of: from about 10% to about 80% modification, from about 20% to about 80% modification, from about 30% to about 80% modification, from about 40% to about 80% modification, from about 50% to about 80% modification, from about 60% to about 80% modification, and from about 70% to about 80% modification.

[0125] In some instances, the oligonucleotide molecule comprises at least one of: from about 10% to about 70% modification, from about 20% to about 70% modification, from about 30% to about 70% modification, from about 40% to about 70% modification, from about 50% to about 70% modification, and from about 60% to about 70% modification.

[0126] In some instances, the oligonucleotide molecule comprises at least one of: from about 10% to about 60% modification, from about 20% to about 60% modification, from about 30% to about 60% modification, from about 40% to about 60% modification, and from about 50% to about 60% modification.

[0127] In some cases, the oligonucleotide molecule comprises at least one of: from about 10% to about 50% modification, from about 20% to about 50% modification, from about 30% to about 50% modification, and from about 40% to about 50% modification.

[0128] In some cases, the oligonucleotide molecule comprises at least one of: from about 10% to about 40% modification, from about 20% to about 40% modification, and from about 30% to about 40% modification.

[0129] In some cases, the oligonucleotide molecule comprises at least one of: from about 10% to about 30% modification, and from about 20% to about 30% modification.

[0130] In some cases, the oligonucleotide molecule comprises from about 10% to about 20% modification.

[0131] In some cases, the oligonucleotide molecule comprises from about 15% to about 90%, from about 20% to about 80%, from about 30% to about 70%, or from about 40% to about 60% modifications.

[0132] In additional cases, the oligonucleotide molecule comprises at least about 15%, 20%, 30%, 40%, 50%, 60%, 70%, 80%, 90%, 95%, or 99% modifications.

[0133] In some embodiments, the oligonucleotide molecule comprises at least about 1, about 2, about 3, about 4, about 5, about 6, about 7, about 8, about 9, about 10, about 11, about 12, about 13, about 14, about 15, about 16, about 17, about 18, about 19, about 20, about 21, about 22, about 23, about 24, about 25, about 26, about 27, about 28, about 29, about 30, about 31, about 32, about 33, about 34, about 35, about 36, about 37, about 38, about 39, or about 40 modifications.

[0134] In some instances, the oligonucleotide molecule comprises at least about 1, about 2, about 3, about 4, about 5, about 6, about 7, about 8, about 9, about 10, about 11, about 12, about 13, about 14, about 15, about 16, about 17, about 18, about 19, about 20, about 21, about 22, about 23, about 24, about 25, about 26, about 27, about 28, about 29, about 30, about 31, about 32, about 33, about 34, about 35, about 36, about 37, about 38, about 39, or about 40 modified nucleotides.

[0135] In some instances, from about 5 to about 100% of the oligonucleotide molecule comprise the synthetic nucleotide analogues described herein. In some instances, about 5%, 10%, 15%, 20%, 25%, 30%, 35%, 40%, 45%, 50%, 55%, 60%, 65%, 70%, 75%, 80%, 85%, 90%, 95% or 100% of the oligonucleotide molecule comprise the synthetic nucleotide analogues described herein. In some instances, about 5% of the oligonucleotide molecule comprises the synthetic nucleotide analogues described herein. In some instances, about 10% of the oligonucleotide molecule comprises the synthetic nucleotide analogues described herein. In some instances, about 15% of the oligonucleotide molecule comprises the synthetic nucleotide analogues described herein. In some instances, about 20% of the oligonucleotide molecule comprises the synthetic nucleotide analogues described herein. In some instances, about 25% of the oligonucleotide molecule comprises the synthetic nucleotide analogues described herein. In some instances, about 30% of the oligonucleotide molecule comprises the synthetic nucleotide analogues described herein. In some instances, about 35% of the oligonucleotide molecule comprises the synthetic nucleotide analogues described herein. In some instances, about 40% of the oligonucleotide molecule comprises the synthetic nucleotide analogues described herein. In some instances, about 45% of the oligonucleotide molecule comprises the synthetic nucleotide analogues described herein. In some instances, about 50% of the oligonucleotide molecule comprises the synthetic nucleotide analogues described herein. In some instances, about 55% of the oligonucleotide molecule comprises the synthetic nucleotide analogues described herein. In some instances, about 60% of the oligonucleotide molecule comprises the synthetic nucleotide analogues described herein. In some instances, about 65% of the oligonucleotide molecule comprises the synthetic nucleotide analogues described herein. In some instances, about 70% of the oligonucleotide molecule comprises the synthetic nucleotide analogues described herein. In some instances, about 75% of the oligonucleotide molecule comprises the synthetic nucleotide analogues described herein. In some instances, about 80% of the oligonucleotide molecule comprises the synthetic nucleotide analogues described herein. In some instances, about 85% of the oligonucleotide molecule comprises the synthetic nucleotide analogues described herein. In some instances, about 90% of the oligonucleotide molecule comprises the synthetic nucleotide analogues described herein. In some instances, about 95% of the oligonucleotide molecule comprises the synthetic nucleotide analogues described herein. In some instances, about 96% of the oligonucleotide molecule comprises the synthetic nucleotide analogues described herein. In some instances, about 97% of the oligonucleotide molecule comprises the synthetic nucleotide analogues described herein. In some instances, about 98% of the oligonucleotide molecule comprises the synthetic nucleotide analogues described herein. In some instances, about 99% of the oligonucleotide molecule comprises the synthetic nucleotide analogues described herein. In some instances, about 100% of the oligonucleotide molecule comprises the synthetic nucleotide analogues described herein. In some embodiments, the synthetic nucleotide analogues include 2′-O-methyl, 2′-O-methoxyethyl (2′-O-MOE), 2′-O-aminopropyl, 2′-deoxy, 2′-deoxy-2′-fluoro, 2′-O-aminopropyl (2′-O-AP), 2′-O-dimethylaminoethyl (2′-O-DMAOE), 2′-O-dimethylaminopropyl (2′-O-DMAP), 2′-O-dimethylaminoethyloxyethyl (2′-O-DMAEOE), or 2′-O—N-methylacetamido (2′-O-NMA) modified, LNA, ENA, PNA, HNA, morpholino, methylphosphonate nucleotides, thiolphosphonate nucleotides, 2′-fluoro N3-P5′-phosphoramidites, or a combination thereof.

[0136] In some embodiments, the oligonucleotide molecule comprises from about 1 to about 25 modifications in which the modification comprises an synthetic nucleotide analogues described herein. In some embodiments, the oligonucleotide molecule comprises about 1 modification in which the modification comprises a synthetic nucleotide analogue described herein. In some embodiments, the oligonucleotide molecule comprises about 2 modifications in which the modifications comprise a synthetic nucleotide analogue described herein. In some embodiments, the oligonucleotide molecule comprises about 3 modifications in which the modifications comprise a synthetic nucleotide analogue described herein. In some embodiments, the oligonucleotide molecule comprises about 4 modifications in which the modifications comprise a synthetic nucleotide analogue described herein. In some embodiments, the oligonucleotide molecule comprises about 5 modifications in which the modifications comprise a synthetic nucleotide analogue described herein. In some embodiments, the oligonucleotide molecule comprises about 6 modifications in which the modifications comprise a synthetic nucleotide analogue described herein. In some embodiments, the oligonucleotide molecule comprises about 7 modifications in which the modifications comprise a synthetic nucleotide analogue described herein. In some embodiments, the oligonucleotide molecule comprises about 8 modifications in which the modifications comprise a synthetic nucleotide analogue described herein. In some embodiments, the oligonucleotide molecule comprises about 9 modifications in which the modifications comprise a synthetic nucleotide analogue described herein. In some embodiments, the oligonucleotide molecule comprises about 10 modifications in which the modifications comprise a synthetic nucleotide analogue described herein. In some embodiments, the oligonucleotide molecule comprises about 11 modifications in which the modifications comprise a synthetic nucleotide analogue described herein. In some embodiments, the oligonucleotide molecule comprises about 12 modifications in which the modifications comprise a synthetic nucleotide analogue described herein. In some embodiments, the oligonucleotide molecule comprises about 13 modifications in which the modifications comprise a synthetic nucleotide analogue described herein. In some embodiments, the oligonucleotide molecule comprises about 14 modifications in which the modifications comprise a synthetic nucleotide analogue described herein. In some embodiments, the oligonucleotide molecule comprises about 15 modifications in which the modifications comprise a synthetic nucleotide analogue described herein. In some embodiments, the oligonucleotide molecule comprises about 16 modifications in which the modifications comprise a synthetic nucleotide analogue described herein. In some embodiments, the oligonucleotide molecule comprises about 17 modifications in which the modifications comprise a synthetic nucleotide analogue described herein. In some embodiments, the oligonucleotide molecule comprises about 18 modifications in which the modifications comprise a synthetic nucleotide analogue described herein. In some embodiments, the oligonucleotide molecule comprises about 19 modifications in which the modifications comprise a synthetic nucleotide analogue described herein. In some embodiments, the oligonucleotide molecule comprises about 20 modifications in which the modifications comprise a synthetic nucleotide analogue described herein. In some embodiments, the oligonucleotide molecule comprises about 21 modifications in which the modifications comprise a synthetic nucleotide analogue described herein. In some embodiments, the oligonucleotide molecule comprises about 22 modifications in which the modifications comprise a synthetic nucleotide analogue described herein. In some embodiments, the oligonucleotide molecule comprises about 23 modifications in which the modifications comprise a synthetic nucleotide analogue described herein. In some embodiments, the oligonucleotide molecule comprises about 24 modifications in which the modifications comprise a synthetic nucleotide analogue described herein. In some embodiments, the oligonucleotide molecule comprises about 25 modifications in which the modifications comprise a synthetic nucleotide analogue described herein. In some embodiments, the oligonucleotide molecule comprises about 26 modifications in which the modifications comprise a synthetic nucleotide analogue described herein. In some embodiments, the oligonucleotide molecule comprises about 27 modifications in which the modifications comprise a synthetic nucleotide analogue described herein. In some embodiments, the oligonucleotide molecule comprises about 28 modifications in which the modifications comprise a synthetic nucleotide analogue described herein. In some embodiments, the oligonucleotide molecule comprises about 29 modifications in which the modifications comprise a synthetic nucleotide analogue described herein. In some embodiments, the oligonucleotide molecule comprises about 30 modifications in which the modifications comprise a synthetic nucleotide analogue described herein. In some embodiments, the oligonucleotide molecule comprises about 31 modifications in which the modifications comprise a synthetic nucleotide analogue described herein. In some embodiments, the oligonucleotide molecule comprises about 32 modifications in which the modifications comprise a synthetic nucleotide analogue described herein. In some embodiments, the oligonucleotide molecule comprises about 33 modifications in which the modifications comprise a synthetic nucleotide analogue described herein. In some embodiments, the oligonucleotide molecule comprises about 34 modifications in which the modifications comprise a synthetic nucleotide analogue described herein. In some embodiments, the oligonucleotide molecule comprises about 35 modifications in which the modifications comprise a synthetic nucleotide analogue described herein. In some embodiments, the oligonucleotide molecule comprises about 36 modifications in which the modifications comprise a synthetic nucleotide analogue described herein. In some embodiments, the oligonucleotide molecule comprises about 37 modifications in which the modifications comprise a synthetic nucleotide analogue described herein. In some embodiments, the oligonucleotide molecule comprises about 38 modifications in which the modifications comprise a synthetic nucleotide analogue described herein. In some embodiments, the oligonucleotide molecule comprises about 39 modifications in which the modifications comprise a synthetic nucleotide analogue described herein. In some embodiments, the oligonucleotide molecule comprises about 40 modifications in which the modifications comprise a synthetic nucleotide analogue described herein.

[0137] In some embodiments, an oligonucleotide molecule is assembled from two separate polynucleotides wherein one polynucleotide comprises the sense strand and the second polynucleotide comprises the antisense strand of the oligonucleotide molecule. In other embodiments, the sense strand is connected to the antisense strand via a linker molecule, which in some instances is a polynucleotide linker or a non-nucleotide linker.

[0138] In some embodiments, an oligonucleotide molecule comprises a sense strand and antisense strand, wherein pyrimidine nucleotides in the sense strand comprises 2′-O-methylpyrimidine nucleotides and purine nucleotides in the sense strand comprise 2′-deoxy purine nucleotides. In some embodiments, an oligonucleotide molecule comprises a sense strand and antisense strand, wherein pyrimidine nucleotides present in the sense strand comprise 2′-deoxy-2′-fluoro pyrimidine nucleotides and wherein purine nucleotides present in the sense strand comprise 2′-deoxy purine nucleotides.

[0139] In some embodiments, an oligonucleotide molecule comprises a sense strand and antisense strand, wherein the pyrimidine nucleotides when present in said antisense strand are 2′-deoxy-2′-fluoro pyrimidine nucleotides and the purine nucleotides when present in said antisense strand are 2′-O-methyl purine nucleotides.

[0140] In some embodiments, an oligonucleotide molecule comprises a sense strand and antisense strand, wherein the pyrimidine nucleotides when present in said antisense strand are 2′-deoxy-2′-fluoro pyrimidine nucleotides and wherein the purine nucleotides when present in said antisense strand comprise 2′-deoxy-purine nucleotides.

[0141] In some embodiments, an oligonucleotide molecule comprises a sense strand and antisense strand, and at least one of sense strand and antisense strands has a plurality of (e.g., two or more, three or more, four or more, five or more, six or more, seven or more, eight or more, etc.) 2′-O-methyl or 2′-deoxy-2′-fluoro modified nucleotides. In some embodiments, at least two, three, four, five, six, or seven out of the a plurality of 2′-O-methyl or 2′-deoxy-2′-fluoro modified nucleotides are consecutive nucleotides. In some embodiments, consecutive 2′-O-methyl or 2′-deoxy-2′-fluoro modified nucleotides are located at the 5′-end of the sense strand and/or the antisense strand. In some embodiments, consecutive 2′-O-methyl or 2′-deoxy-2′-fluoro modified nucleotides are located at the 3′-end of the sense strand and/or the antisense strand. In some embodiments, the sense strand of oligonucleotide molecule includes at least four, at least five, at least six consecutive 2′-O-methyl modified nucleotides at its 5′ end and/or 3′ end, or both. Optionally, in such embodiments, the sense strand of oligonucleotide molecule includes at least one, at least two, at least three, at least four 2′-deoxy-2′-fluoro modified nucleotides at the 3′ end of the at least four, at least five, at least six consecutive 2′-O-methyl modified nucleotides at the polynucleotides' 5′ end, or at the 5′ end of the at least four, at least five, at least six consecutive 2′-O-methyl modified nucleotides at polynucleotides' 3′ end. Also optionally, such at least two, at least three, at least four 2′-deoxy-2′-fluoro modified nucleotides are consecutive nucleotides.

[0142] In some embodiments, an oligonucleotide molecule comprises a sense strand and antisense strand, and at least one of sense strand and antisense strand has 2′-O-methyl modified nucleotide located at the 5′ end of the sense strand and/or the antisense strand. In some embodiments, at least one of sense strand and antisense strands has 2′-O-methyl modified nucleotide located at the 3′ end of the sense strand and/or the antisense strand. In some embodiments, the 2′-O-methyl modified nucleotide located at the 5′ end of the sense strand and/or the antisense strand is a purine nucleotide. In some embodiments, the 2′-O-methyl modified nucleotide located at the 5′ end of the sense strand and/or the antisense strand is a pyrimidine nucleotide.

[0143] In some embodiments, an oligonucleotide molecule comprises a sense strand and antisense strand, and one of sense strand and antisense strand has at least two consecutive 2′-deoxy-2′-fluoro modified nucleotides located at the 5′ end, while another strand has at least two consecutive 2′-O-methyl modified nucleotides located at the 5′ end. In some embodiments, where the strand has at least two consecutive 2′-deoxy-2′-fluoro modified nucleotides located at the 5′ end, the strand also includes at least two, at least three consecutive 2′-O-methyl modified nucleotides at the 3′ end of the at least two consecutive 2′-deoxy-2′-fluoro modified nucleotides. In some embodiments, one of sense strand and antisense strand has at least two, at least three, at least four, at least five, at least six, or at least seven consecutive 2′-O-methyl modified nucleotides that are linked to a 2′-deoxy-2′-fluoro modified nucleotide on its 5′ end and/or 3′ end. In some embodiments, one of sense strand and antisense strand has at least four, at least five nucleotides that have alternating 2′-O-methyl modified nucleotide and 2′-deoxy-2′-fluoro modified nucleotide.

[0144] In some embodiments, the oligonucleotide molecule, such as an siRNA, has the formula as illustrated in Formula III:

Sense-strand (SS)
N₁N₂N₃N₄N₅N₆N₇N₈N₉N₁₀N₁₁N₁₂N₁₃N₁₄N₁₅N₁₆N₁₇N₁₈N₁₉
Antisense-strand (AS),
N₂₁N₂₀N₁₉N₁₈N₁₇N₁₆N₁₅N₁₄N₁₃N₁₂N₁₁N₁₀N₉N₈N₇N₆N₅N₄N₃N₂N₁

[0145] wherein each nucleotide represented by N, is independently, A, U, C, or G or a modified nucleotide base, such as those provided for herein. The N₁ nucleotides of the sense strand and the antisense strand represent the 5′ end of the respective strands. For clarity, although Formula III utilizes N₁, N₂, N₃, etc. in both the sense and the antisense strand, the nucleotide bases do not need to be the same and are not intended to be the same. The siRNA that is illustrated in Formula III would be complementary to a target sequence.

[0146] For example, in some embodiments, the sense strand comprises a 2′O-methyl modified nucleotide with a phosphorothioate (PS) modified backbone at N₁ and N₂, a 2′-fluoro modified nucleotide at N₃, N₇, N₈, N₉, N₁₂, and N₁₇, and a 2′O-methyl modified nucleotide at N₄, N₅, N₆, N₁₀, N₁₁, N₁₃, N₁₄, N₁₅, N₁₆, N₁₈, and N₁₉.

[0147] In some embodiments, the antisense strand comprises a vinyl phosphonate moiety attached to N₁, a 2′fluoro-modified nucleotide with a phosphorothioate (PS) modified backbone at N₂, a 2′O-methyl modified nucleotide at N₃, N₄, N₅, N₆, N₇, N₈, N₉, N₁₀, N₁₁, N₁₂, N₁₃, N₁₅, N₁₆, N₁₇, N₁₈, and N₁₉, a 2′fluoro-modified nucleotide at N₁₄, and a 2′O-methyl modified nucleotide with a phosphorothioate (PS) modified backbone at N₂₀ and N₂₁.

[0148] In some embodiments, an oligonucleotide molecule comprises a sense strand and antisense strand, wherein the sense strand includes a terminal cap moiety at the 5′ end, the 3′ end, or both of the 5′ and 3′ ends of the sense strand. In other embodiments, the terminal cap moiety is an inverted deoxy abasic moiety.

[0149] In some embodiments, an oligonucleotide molecule comprises a sense strand and an antisense strand, wherein the antisense strand comprises a glyceryl modification at the 3′ end of the antisense strand.

[0150] In some embodiments, an oligonucleotide molecule comprises a sense strand and an antisense strand, in which the sense strand comprises one or more, for example, about 1, 2, 3, 4, 5, 6, 7, 8, 9, 10, 11, 12, 13, 14, 15, 16, 17, 18, 19, 20, or more phosphorothioate, phosphorodithioate, phosphonate, phosphoramidate, or mesyl phosphoramidate internucleotide linkages, and/or one or more (e.g., about 1, 2, 3, 4, 5, 6, 7, 8, 9, 10 or more) 2′-deoxy, 2′-O-methyl, 2′-deoxy-2′-fluoro, and/or about one or more (e.g., about 1, 2, 3, 4, 5, 6, 7, 8, 9, 10 or more) universal base modified nucleotides, and optionally a terminal cap molecule at the 3′ end, the 5′ end, or both of the 3′- and 5′-ends of the sense strand; and in which the antisense strand comprises about 1 to about 10 or more, specifically about 1, 2, 3, 4, 5, 6, 7, 8, 9, 10, 11, 12, 13, 14, 15, 16, 17, 18, 19, 20, or more phosphorothioate, phosphorodithioate, phosphonate, phosphoramidate, or mesyl phosphoramidate internucleotide linkages, and/or one or more (e.g., about 1, 2, 3, 4, 5, 6, 7, 8, 9, 10 or more) 2′-deoxy, 2′-O-methyl, 2′-deoxy-2′-fluoro, and/or one or more (e.g., about 1, 2, 3, 4, 5, 6, 7, 8, 9, 10 or more) universal base modified nucleotides, and optionally a terminal cap molecule at the 3′ end, the 5′ end, or both of the 3′ and 5′ ends of the antisense strand. In other embodiments, one or more, for example about 1, 2, 3, 4, 5, 6, 7, 8, 9, 10, or more, pyrimidine nucleotides of the sense and/or antisense strand are chemically-modified with 2′-deoxy, 2′-O-methyl and/or 2′-deoxy-2′-fluoro nucleotides, with or without one or more, for example about 1, 2, 3, 4, 5, 6, 7, 8, 9, 10, or more, phosphorothioate, phosphorodithioate, phosphonate, phosphoramidate, or mesyl phosphoramidate internucleotide linkages and/or a terminal cap molecule at the 3′ end, the 5′ end, or both of the 3′ and 5′ ends, being present in the same or different strand.

[0151] In some embodiments, an oligonucleotide molecule comprises a sense strand and an antisense strand, in which the sense strand comprises about 1 to about 25, for example, about 1, 2, 3, 4, 5, 6, 7, 8, 9, 10, 11, 12, 13, 14, 15, 16, 17, 18, 19, 20, or more phosphorothioate, phosphorodithioate, phosphonate, phosphoramidate, or mesyl phosphoramidate internucleotide linkages, and/or one or more (e.g., about 1, 2, 3, 4, 5, 6, 7, 8, 9, 10, or more) 2′-deoxy, 2′-O-methyl, 2′-deoxy-2′-fluoro, and/or one or more (e.g., about 1, 2, 3, 4, 5, 6, 7, 8, 9, 10, or more) universal base modified nucleotides, and optionally a terminal cap molecule at the 3′ end, the 5′ end, or both of the 3′ and 5′ ends of the sense strand; and in which the antisense strand comprises about 1 to about 25 or more, for example about 1, 2, 3, 4, 5, 6, 7, 8, 9, 10, 11, 12, 13, 14, 15, 16, 17, 18, 19, 20, or more phosphorothioate, phosphorodithioate, phosphonate, phosphoramidate, or mesyl phosphoramidate internucleotide linkages, and/or one or more (e.g., about 1, 2, 3, 4, 5, 6, 7, 8, 9, 10 or more) 2′-deoxy, 2′-O-methyl, 2′-deoxy-2′-fluoro, and/or one or more (e.g., about 1, 2, 3, 4, 5, 6, 7, 8, 9, 10 or more) universal base modified nucleotides, and optionally a terminal cap molecule at the 3′ end, the 5′ end, or both of the 3′ and 5′ ends of the antisense strand. In other embodiments, one or more, for example about 1, 2, 3, 4, 5, 6, 7, 8, 9, 10, or more, pyrimidine nucleotides of the sense and/or antisense strand are chemically-modified with 2′-deoxy, 2′-O-methyl and/or 2′-deoxy-2′-fluoro nucleotides, with or without about 1 to about 25 or more, for example about 1, 2, 3, 4, 5, 6, 7, 8, 9, 10, 11, 12, 13, 14, 15, 16, 17, 18, 19, 20, or more phosphorothioate, phosphorodithioate, phosphonate, phosphoramidate, or mesyl phosphoramidate internucleotide linkages and/or a terminal cap molecule at the 3′ end, the 5′ end, or both of the 3′ and 5′ ends, being present in the same or different strand.

[0152] In some embodiments, an oligonucleotide molecule comprises a sense strand and an antisense strand, in which the antisense strand comprises one or more, for example, about 1, 2, 3, 4, 5, 6, 7, 8, 9, 10, 11, 12, 13, 14, 15, 16, 17, 18, 19, 20, or more phosphorothioate, phosphorodithioate, phosphonate, phosphoramidate, or mesyl phosphoramidate internucleotide linkages, and/or about one or more (e.g., about 1, 2, 3, 4, 5, 6, 7, 8, 9, 10 or more) 2′-deoxy, 2′-O-methyl, 2′-deoxy-2′-fluoro, and/or one or more (e.g., about 1, 2, 3, 4, 5, 6, 7, 8, 9, 10 or more) universal base modified nucleotides at the 3′ end, the 5′ end, or both of the 3′ and 5′ ends of the sense strand and/or antisense strand, and optionally a terminal cap molecule at the 3′ end, the 5′ end, or both of the 3′ and 5′ ends of the sense strand. In some embodiments, the antisense strand comprises about 1 to about 10 or more, specifically about 1, 2, 3, 4, 5, 6, 7, 8, 9, 10 or more phosphorothioate, phosphorodithioate, phosphonate, phosphoramidate, or mesyl phosphoramidate internucleotide linkages, and/or one or more (e.g., about 1, 2, 3, 4, 5, 6, 7, 8, 9, 10 or more) 2′-deoxy, 2′-O-methyl, 2′-deoxy-2′-fluoro, and/or one or more (e.g., about 1, 2, 3, 4, 5, 6, 7, 8, 9, 10 or more) universal base modified nucleotides, and optionally a terminal cap molecule at the 3′ end, the 5′ end, or both of the 3′ and 5′ ends of the antisense strand. In other embodiments, one or more, for example about 1, 2, 3, 4, 5, 6, 7, 8, 9, 10, 11, 12, 13, 14, 15, 16, 17, 18, 19, 20, or more pyrimidine nucleotides of the sense and/or antisense strand are chemically-modified with 2′-deoxy, 2′-O-methyl and/or 2′-deoxy-2′-fluoro nucleotides, with or without one or more, for example, about 1, 2, 3, 4, 5, 6, 7, 8, 9, 10 or more phosphorothioate, phosphorodithioate, phosphonate, phosphoramidate, or mesyl phosphoramidate internucleotide linkages and/or a terminal cap molecule at the 3′ end, the 5′ end, or both of the 3′ and 5′ ends, being present in the same or different strand.

[0153] In some embodiments, an oligonucleotide molecule comprises a sense strand and an antisense strand, in which the antisense strand comprises about 1 to about 25 or more, for example, about 1, 2, 3, 4, 5, 6, 7, 8, 9, 10, 11, 12, 13, 14, 15, 16, 17, 18, 19, 20, or more phosphorothioate, phosphorodithioate, phosphonate, phosphoramidate, or mesyl phosphoramidate internucleotide linkages, and/or one or more (e.g., about 1, 2, 3, 4, 5, 6, 7, 8, 9, 10 or more) 2′-deoxy, 2′-O-methyl, 2′-deoxy-2′-fluoro, and/or one or more (e.g., about 1, 2, 3, 4, 5, 6, 7, 8, 9, 10 or more) universal base modified nucleotides, and optionally a terminal cap molecule at the 3′ end, the 5′ end, or both of the 3′ and 5′ ends of the sense strand; and the antisense strand comprises about 1 to about 25 or more, for example about 1, 2, 3, 4, 5, 6, 7, 8, 9, 10, 11, 12, 13, 14, 15, 16, 17, 18, 19, 20, or more phosphorothioate, phosphorodithioate, phosphonate, phosphoramidate, or mesyl phosphoramidate internucleotide linkages, and/or one or more (e.g., about 1, 2, 3, 4, 5, 6, 7, 8, 9, 10 or more) 2′-deoxy, 2′-O-methyl, 2′-deoxy-2′-fluoro, and/or one or more (e.g., about 1, 2, 3, 4, 5, 6, 7, 8, 9, 10 or more) universal base modified nucleotides, and optionally a terminal cap molecule at the 3′ end, the 5′ end, or both of the 3′ and 5′ ends of the antisense strand. In other embodiments, one or more, for example about 1, 2, 3, 4, 5, 6, 7, 8, 9, 10 or more pyrimidine nucleotides of the sense and/or antisense strand are chemically-modified with 2′-deoxy, 2′-O-methyl and/or 2′-deoxy-2′-fluoro nucleotides, with or without about 1 to about 5, for example about 1, 2, 3, 4, 5 or more phosphorothioate, phosphorodithioate, phosphonate, phosphoramidate, or mesyl phosphoramidate internucleotide linkages and/or a terminal cap molecule at the 3′ end, the 5′ end, or both of the 3′ and 5′ ends, being present in the same or different strand.

[0154] In some embodiments, an oligonucleotide molecule described herein is a chemically-modified short interfering nucleic acid molecule having about 1 to about 25, for example, about 1, 2, 3, 4, 5, 6, 7, 8, 9, 10, 11, 12, 13, 14, 15, 16, 17, 18, 19, 20 or more phosphorothioate, phosphorodithioate, phosphonate, phosphoramidate, or mesyl phosphoramidate internucleotide linkages in each strand of the oligonucleotide molecule. In some embodiments, an oligonucleotide molecule comprises a sense strand and an antisense strand, and the antisense strand comprises a phosphate backbone modification at the 3′ end of the antisense strand. Alternatively and/or additionally, an oligonucleotide molecule comprises a sense strand and an antisense strand, and the sense strand comprises a phosphate backbone modification at the 5′ end of the antisense strand. In some instances, the phosphate backbone modification is a phosphorothioate. In some instances, the phosphate backbone modification is a phosphorodithioate. In some instances, the phosphate backbone modification is a phosphonate. In some instances, the phosphate backbone modification is a phosphoramidate. In some instances, the phosphate backbone modification is a mesyl phosphoramidate. In some embodiments, the sense or antisense strand has three consecutive nucleosides that are coupled via two phosphorothioate backbone. In some embodiments, the sense or antisense strand has three consecutive nucleosides that are coupled via two phosphorodithioate backbone. In some embodiments, the sense or antisense strand has three consecutive nucleosides that are coupled via two phosphonate backbone. In some embodiments, the sense or antisense strand has three consecutive nucleosides that are coupled via two phosphoramidate backbone. In some embodiments, the sense or antisense strand has three consecutive nucleosides that are coupled via two mesyl phosphoramidate backbone.

[0155] In another embodiment, an oligonucleotide molecule described herein comprises 2′-5′ internucleotide linkages. In some instances, the 2′-5′ internucleotide linkage(s) is at the 3′ end, the 5′ end, or both of the 3′ and 5′ ends of one or both sequence strands. In addition instances, the 2′-5′ internucleotide linkage(s) is present at various other positions within one or both sequence strands, for example, about 1, 2, 3, 4, 5, 6, 7, 8, 9, 10, or more including every internucleotide linkage of a pyrimidine nucleotide in one or both strands of the oligonucleotide molecule comprise a 2′-5′ internucleotide linkage, or about 1, 2, 3, 4, 5, 6, 7, 8, 9, 10, or more including every internucleotide linkage of a purine nucleotide in one or both strands of the oligonucleotide molecule comprise a 2′-5′ internucleotide linkage.

[0156] In some embodiments, an oligonucleotide molecule is a single stranded molecule that mediates RNAi activity in a cell or reconstituted in vitro system, wherein the oligonucleotide molecule comprises a single stranded polynucleotide having complementarity to a target nucleic acid sequence, and wherein one or more pyrimidine nucleotides present in the oligonucleotide molecule are 2′-deoxy-2′-fluoro pyrimidine nucleotides (e.g., wherein all pyrimidine nucleotides are 2′-deoxy-2′-fluoro pyrimidine nucleotides or alternately a plurality of pyrimidine nucleotides are 2′-deoxy-2′-fluoro pyrimidine nucleotides), and wherein any purine nucleotides present in the oligonucleotide molecule are 2′-deoxy purine nucleotides (e.g., wherein all purine nucleotides are 2′-deoxy purine nucleotides or alternately a plurality of purine nucleotides are 2′-deoxy purine nucleotides), and a terminal cap modification, that is optionally present at the 3′-end, the 5′-end, or both of the 3′ and 5′-ends of the antisense sequence, the oligonucleotide molecule optionally further comprising about 1 to about 4 (e.g., about 1, 2, 3, or 4) terminal 2′-deoxynucleotides at the 3′-end of the oligonucleotide molecule, wherein the terminal nucleotides further comprise one or more (e.g., 1, 2, 3, or 4) phosphorothioate or mesyl phosphoramidate internucleotide linkages, and wherein the oligonucleotide molecule optionally further comprises a terminal phosphate group, such as a 5′-terminal phosphate group.

[0157] In some cases, one or more of the synthetic nucleotide analogues described herein are resistant toward nucleases, such as ribonuclease (e.g., RNase H), deoxyribonuclease (e.g., DNase), or exonuclease (e.g., 5′-3′ exonuclease and 3′-5′ exonuclease), when compared to natural polynucleic acid molecules and endonucleases. In some instances, synthetic nucleotide analogues comprising 2′-O-methyl, 2′-O-methoxyethyl (2′-O-MOE), 2′-O-aminopropyl, 2′-deoxy, 2′-deoxy-2′-fluoro, 2′-O-aminopropyl (2′-O-AP), 2′-O-dimethylaminoethyl (2′-O-DMAOE), 2′-O-dimethylaminopropyl (2′-O-DMAP), 2′-O-dimethylaminoethyloxyethyl (2′-O-DMAEOE), or 2′-O—N-methylacetamido (2′-O-NMA) modified, LNA, ENA, PNA, HNA, morpholino, methylphosphonate nucleotides, thiolphosphonate nucleotides, 2′-fluoro N3-P5′-phosphoramidites, or combinations thereof are resistant toward nucleases such as ribonuclease (e.g., RNase H), deoxyribonuclease (e.g., DNase), or exonuclease (e.g., 5′-3′ exonuclease and 3′-5′ exonuclease). In some instances, a 2′-O-methyl modified oligonucleotide molecule is nuclease resistant (e.g., RNase H, DNase, 5′-3′ exonuclease or 3′-5′ exonuclease resistant). In some instances, a 2′O-methoxyethyl (2′-O-MOE) modified oligonucleotide molecule is nuclease resistant (e.g., RNase H, DNase, 5′-3′ exonuclease or 3′-5′ exonuclease resistant). In some instances, a 2′-O-aminopropyl modified oligonucleotide molecule is nuclease resistant (e.g., RNase H, DNase, 5′-3′ exonuclease or 3′-5′ exonuclease resistant). In some instances, a 2′-deoxy modified oligonucleotide molecule is nuclease resistant (e.g., RNase H, DNase, 5′-3′ exonuclease or 3′-5′ exonuclease resistance). In some instances, a 2′-deoxy-2′-fluoro modified oligonucleotide molecule is nuclease resistant (e.g., RNase H, DNase, 5′-3′ exonuclease or 3′-5′ exonuclease resistant). In some instances, a 2′-O-aminopropyl (2′-O-AP) modified oligonucleotide molecule is nuclease resistant (e.g., RNase H, DNase, 5′-3′ exonuclease or 3′-5′ exonuclease resistant). In some instances, a 2′-O-dimethylaminoethyl (2′-O-DMAOE) modified oligonucleotide molecule is nuclease resistant (e.g., RNase H, DNase, 5′-3′ exonuclease or 3′-5′ exonuclease resistant). In some instances, a 2′-O-dimethylaminopropyl (2′-O-DMAP) modified oligonucleotide molecule is nuclease resistant (e.g., RNase H, DNase, 5′-3′ exonuclease or 3′-5′ exonuclease resistant). In some instances, a 2′-O-dimethylaminoethyloxyethyl (2′-O-DMAEOE) modified oligonucleotide molecule is nuclease resistant (e.g., RNase H, DNase, 5′-3′ exonuclease or 3′-5′ exonuclease resistant). In some instances, a 2′-O—N-methylacetamido (2′-O-NMA) modified oligonucleotide molecule is nuclease resistant (e.g., RNase H, DNase, 5′-3′ exonuclease or 3′-5′ exonuclease resistant). In some instances, an LNA modified oligonucleotide molecule is nuclease resistant (e.g., RNase H, DNase, 5′-3′ exonuclease or 3′-5′ exonuclease resistant). In some instances, an ENA modified oligonucleotide molecule is nuclease resistant (e.g., RNase H, DNase, 5′-3′ exonuclease or 3′-5′ exonuclease resistant). In some instances, an HNA modified oligonucleotide molecule is nuclease resistant (e.g., RNase H, DNase, 5′-3′ exonuclease or 3′-5′ exonuclease resistant). In some instances, morpholinos are nuclease resistant (e.g., RNase H, DNase, 5′-3′ exonuclease or 3′-5′ exonuclease resistant). In some instances, a PNA modified oligonucleotide molecule is resistant to nucleases (e.g., RNase H, DNase, 5′-3′ exonuclease or 3′-5′ exonuclease resistant). In some instances, a methylphosphonate modified oligonucleotide molecule is nuclease resistant (e.g., RNase H, DNase, 5′-3′ exonuclease or 3′-5′ exonuclease resistant). In some instances, a thiolphosphonate modified oligonucleotide molecule is nuclease resistant (e.g., RNase H, DNase, 5′-3′ exonuclease or 3′-5′ exonuclease resistant). In some instances, an oligonucleotide molecule comprising 2′-fluoro N3-P5′-phosphoramidites is nuclease resistant (e.g., RNase H, DNase, 5′-3′ exonuclease or 3′-5′ exonuclease resistant). In some instances, the 5′ conjugates described herein inhibit 5′-3′ exonucleolytic cleavage. In some instances, the 3′ conjugates described herein inhibit 3′-5′ exonucleolytic cleavage.

[0158] In some embodiments, one or more of the synthetic nucleotide analogues described herein have increased binding affinity toward their mRNA target relative to an equivalent natural polynucleic acid molecule. The one or more of the synthetic nucleotide analogues comprising 2′-O-methyl, 2′-O-methoxyethyl (2′-O-MOE), 2′-O-aminopropyl, 2′-deoxy, 2′-deoxy-2′-fluoro, 2′-O-aminopropyl (2′-O-AP), 2′-O-dimethylaminoethyl (2′-O-DMAOE), 2′-0-dimethylaminopropyl (2′-O-DMAP), 2′-O-dimethylaminoethyloxyethyl (2′-O-DMAEOE), or 2′-O—N-methylacetamido (2′-O-NMA) modified, LNA, ENA, PNA, HNA, morpholino, methylphosphonate nucleotides, thiolphosphonate nucleotides, or 2′-fluoro N3-P5′-phosphoramidites have increased binding affinity toward their mRNA target relative to an equivalent natural polynucleic acid molecule. In some instances, a 2′-O-methyl modified oligonucleotide molecule has increased binding affinity toward their mRNA target relative to an equivalent natural polynucleic acid molecule. In some instances, a 2′-O-methoxyethyl (2′-O-MOE) modified oligonucleotide molecule has increased binding affinity toward their mRNA target relative to an equivalent natural polynucleic acid molecule. In some instances, a 2′-O-aminopropyl modified oligonucleotide molecule has increased binding affinity toward an mRNA target relative to an equivalent natural polynucleic acid molecule. In some instances, 2′-deoxy modified oligonucleotide molecule has increased binding affinity toward their mRNA target relative to an equivalent natural polynucleic acid molecule. In some instances, a 2′-deoxy-2′-fluoro modified oligonucleotide molecule has increased binding affinity toward their mRNA target relative to an equivalent natural polynucleic acid molecule. In some instances, a 2′-O-aminopropyl (2′-O-AP) modified oligonucleotide molecule has increased binding affinity toward their mRNA target relative to an equivalent natural polynucleic acid molecule. In some instances, a 2′-O-dimethylaminoethyl (2′-O-DMAOE) modified oligonucleotide molecule has increased binding affinity toward their mRNA target relative to an equivalent natural polynucleic acid molecule. In some instances, a 2′-O-dimethylaminopropyl (2′-O-DMAP) modified oligonucleotide molecule has increased binding affinity toward their mRNA target relative to an equivalent natural polynucleic acid molecule. In some instances, a 2′-O-dimethylaminoethyloxyethyl (2′-O-DMAEOE) modified oligonucleotide molecule has increased binding affinity toward their mRNA target relative to an equivalent natural polynucleic acid molecule. In some instances, a 2′-O—N-methylacetamido (2′-O-NMA) modified oligonucleotide molecule has increased binding affinity toward their mRNA target relative to an equivalent natural polynucleic acid molecule. In some instances, an LNA modified oligonucleotide molecule has increased binding affinity toward their mRNA target relative to an equivalent natural polynucleic acid molecule. In some instances, an ENA modified oligonucleotide molecule has increased binding affinity toward their mRNA target relative to an equivalent natural polynucleic acid molecule. In some instances, a PNA modified oligonucleotide molecule has increased binding affinity toward their mRNA target relative to an equivalent natural polynucleic acid molecule. In some instances, an HNA modified oligonucleotide molecule has increased binding affinity toward their mRNA target relative to an equivalent natural polynucleic acid molecule. In some instances, a morpholino modified oligonucleotide molecule has increased binding affinity toward their mRNA target relative to an equivalent natural polynucleic acid molecule. In some instances, a methylphosphonate nucleotides modified oligonucleotide molecule has increased binding affinity toward their mRNA target relative to an equivalent natural polynucleic acid molecule. In some instances, a thiolphosphonate nucleotides modified oligonucleotide molecule has increased binding affinity toward their mRNA target relative to an equivalent natural polynucleic acid molecule. In some instances, an oligonucleotide molecule comprising 2′-fluoro N3-P5′-phosphoramidites has increased binding affinity toward an mRNA target relative to an equivalent natural polynucleic acid molecule. In some cases, the increased affinity is illustrated with a lower Kd, a higher melt temperature (Tm), or a combination thereof.

[0159] In some embodiments, an oligonucleotide molecule described herein is a chirally pure (or stereo pure) polynucleic acid molecule, or a polynucleic acid molecule comprising a single enantiomer. In some instances, the oligonucleotide molecule comprises L-nucleotide. In some instances, the oligonucleotide molecule comprises D-nucleotides. In some instance, an oligonucleotide molecule composition comprises less than 30%, 25%, 20%, 15%, 10%, 5%, 4%, 3%, 2%, 1%, or less of its mirror enantiomer. In some cases, an oligonucleotide molecule composition comprises less than 30%, 25%, 20%, 15%, 10%, 5%, 4%, 3%, 2%, 1%, or less of a racemic mixture.

[0160] In some embodiments, an oligonucleotide molecule described herein is further modified to include an aptamer conjugating moiety. In some instances, the aptamer conjugating moiety is a DNA aptamer conjugating moiety. In some instances, the aptamer conjugating moiety is Alphamer, which comprises an aptamer portion that recognizes a specific cell-surface target and a portion that presents a specific epitope for attaching to circulating antibodies.

[0161] In additional embodiments, an oligonucleotide molecule described herein is modified to increase its stability. In some embodiment, the oligonucleotide molecule is RNA (e.g., siRNA). In some instances, the oligonucleotide molecule is modified by one or more of the modifications described above to increase its stability. In some cases, the oligonucleotide molecule is modified at the 2′ hydroxyl position, such as by 2′-O-methyl, 2′-O-methoxyethyl (2′-O-MOE), 2′-O-aminopropyl, 2′-deoxy, 2′-deoxy-2′-fluoro, 2′-O-aminopropyl (2′-O-AP), 2′-O-dimethylaminoethyl (2′-O-DMAOE), 2′-O-dimethylaminopropyl (2′-O-DMAP), 2′-O-dimethylaminoethyloxyethyl (2′-O-DMAEOE), or 2′-O—N-methylacetamido (2′-O-NMA) modification or by a locked or bridged ribose conformation (e.g., LNA or ENA). In some cases, the oligonucleotide molecule is modified by 2′-O-methyl and/or 2′-O-methoxyethyl ribose. In some cases, the oligonucleotide molecule also includes morpholinos, PNAs, HNA, methylphosphonate nucleotides, thiolphosphonate nucleotides, and/or 2′-fluoro N3-P5′-phosphoramidites to increase its stability. In some instances, the oligonucleotide molecule is a chirally pure (or stereo pure) oligonucleotide molecule. In some instances, the chirally pure (or stereo pure) oligonucleotide molecule is modified to increase its stability. Suitable modifications to the RNA to increase stability for delivery will be apparent to the skilled person.

[0162] In some embodiments, the oligonucleotide molecule comprises 2′ modifications. In some embodiments, the nucleotides of the oligonucleotide molecule at positions 3, 7, 8, 9, 12, and 17 from the 5′ end of the sense strand are not modified with a 2′O-methyl modification. In some embodiments, the nucleotides of the oligonucleotide molecule at positions 3, 7, 8, 9, 12, and 17 from the 5′ end of the sense strand are modified with a 2′fluoro modification. In some embodiments, the nucleotides of the oligonucleotide molecule at positions 2 and 14 from the 5′ end of the antisense strand are not modified with a 2′O-methyl modification. In some embodiments, the nucleotides of the oligonucleotide molecule at positions 2 and 14 from the 5′ end of the antisense strand are modified with a 2′fluoro modification. In some embodiments, any of the nucleotides may further comprise a 5′-phosphorothioate group modification. In some embodiments, the nucleotides of the oligonucleotide molecule at positions 1 and 2 from the 5′ end of the sense strand are modified with a 5′-phosphorothioate group modification. In some embodiments, the nucleotides of the oligonucleotide molecule at positions 1, 2, 20, and 21 from the 5′ end of the antisense strand are modified with a 5′-phosphorothioate group modification. In some embodiments, the 5′ end of the sense or antisense strand of the oligonucleotide molecule may further comprise a vinylphosphonate modification. In some embodiments, the nucleotide of the oligonucleotide molecule at position 1 from the 5′ end of the antisense strand is modified with a vinylphosphonate modification.

[0163] In some instances, the oligonucleotide molecule is a double-stranded polynucleotide molecule comprising self-complementary sense and antisense regions, wherein the antisense region comprises nucleotide sequence that is complementary to nucleotide sequence in a target nucleic acid molecule or a portion thereof and the sense region having nucleotide sequence corresponding to the target nucleic acid sequence or a portion thereof. In some instances, the oligonucleotide molecule is assembled from two separate polynucleotides, where one strand is the sense strand and the other is the antisense strand, wherein the antisense and sense strands are self-complementary (e.g., each strand comprises nucleotide sequence that is complementary to nucleotide sequence in the other strand; such as where the antisense strand and sense strand form a duplex or double stranded structure, for example wherein the double stranded region is about 19, 20, 21, 22, 23, or more base pairs); the antisense strand comprises nucleotide sequence that is complementary to nucleotide sequence in a target nucleic acid molecule or a portion thereof and the sense strand comprises nucleotide sequence corresponding to the target nucleic acid sequence or a portion thereof. Alternatively, the oligonucleotide molecule is assembled from a single oligonucleotide, where the self-complementary sense and antisense regions of the oligonucleotide molecule are linked by means of a nucleic acid-based or non-nucleic acid-based linker(s).

[0164] In some cases, the oligonucleotide molecule is a polynucleotide with a duplex, asymmetric duplex, hairpin or asymmetric hairpin secondary structure, having self-complementary sense and antisense regions, wherein the antisense region comprises a nucleic acid sequence that is complementary to a nucleic acid sequence in a separate target nucleic acid molecule or a portion thereof and the sense region comprises a nucleic acid sequence corresponding to the target nucleic acid sequence or a portion thereof. In other cases, the oligonucleotide molecule is a circular single-stranded polynucleotide having two or more loop structures and a stem comprising self-complementary sense and antisense regions, wherein the antisense region comprises a nucleic acid sequence that is complementary to a nucleic acid sequence in a target nucleic acid molecule or a portion thereof and the sense region comprises a nucleic acid sequence corresponding to the target nucleic acid sequence or a portion thereof, and wherein the circular polynucleotide is processed either in vivo or in vitro to generate an active oligonucleotide molecule capable of mediating RNAi. In additional cases, the oligonucleotide molecule also comprises a single-stranded polynucleotide comprising a nucleic acid sequence complementary to a nucleic acid sequence in a target nucleic acid molecule or a portion thereof (for example, where such oligonucleotide molecule does not require the presence within the oligonucleotide molecule of a nucleic acid sequence corresponding to the target nucleic acid sequence or a portion thereof), wherein the single stranded polynucleotide further comprises a terminal phosphate group, such as a 5′-phosphate, or 5′, 3′-diphosphate.

[0165] In some instances, an asymmetric hairpin is a linear oligonucleotide molecule comprising an antisense region, a loop portion that comprises nucleotides or non-nucleotides, and a sense region that comprises fewer nucleotides than the antisense region to the extent that the sense region has enough complimentary nucleotides to base pair with the antisense region and form a duplex with loop. For example, an asymmetric hairpin oligonucleotide molecule comprises an antisense region having length sufficient to mediate RNAi in a cell or in vitro system (e.g., about 19 to about 22 nucleotides) and a loop region comprising about 4 to about 8 nucleotides, and a sense region having about 3 to about 18 nucleotides that are complementary to the antisense region. In some cases, the asymmetric hairpin oligonucleotide molecule also comprises a 5′-terminal phosphate group that is chemically modified. In additional cases, the loop portion of the asymmetric hairpin oligonucleotide molecule comprises nucleotides, non-nucleotides, linker molecules, or conjugate molecules.

[0166] In some embodiments, an asymmetric duplex is an oligonucleotide molecule having two separate strands comprising a sense region and an antisense region, wherein the sense region comprises fewer nucleotides than the antisense region to the extent that the sense region has enough complimentary nucleotides to base pair with the antisense region and form a duplex. For example, an asymmetric duplex oligonucleotide molecule comprises an antisense region having length sufficient to mediate RNAi in a cell or in vitro system (e.g., about 19 to about 22 nucleotides) and a sense region having about 3 to about 19 nucleotides that are complementary to the antisense region.

[0167] In some cases, a universal base refers to nucleotide base analogs that form base pairs with each of the natural DNA/RNA bases with little discrimination between them. Non-limiting examples of universal bases include C-phenyl, C-naphthyl and other aromatic derivatives, inosine, azole carboxamides, and nitroazole derivatives such as 3-nitropyrrole, 4-nitroindole, 5-nitroindole, and 6-nitroindole, as known in the art.

[0168] In some embodiments, the dsRNA agents are 5′ phosphorylated or include a phosphoryl analog at the 5′ terminus. 5′-phosphate modifications include those which are compatible with RISC mediated gene silencing. Suitable modifications include: 5′-monophosphate (HO₂(O)P—O-5′); 5′-diphosphate ((HO)₂(O)P—O—P(HO)(O)—O-5′); 5′-triphosphate ((HO)₂(O)P—O—(HO)(O)P—O—P(HO)(O)—O-5′); 5′-guanosine cap (7-methylated or non-methylated) (7m-G-O-5′-(HO)(O)P—O—(HO)(O)P—O—P(HO)(O)—O-5′); 5′-adenosine cap (Appp), and any modified or unmodified nucleotide cap structure (N—O-5′-(HO)(O)P—O—(HO)(O)P—O—P(HO)(O)—O-5′); 5′-monothiophosphate (phosphorothioate; (HO)₂(S)P—O-5′); 5′-monodithiophosphate (phosphorodithioate; (HO)(HS)(S)P—O-5′), 5′-phosphorothiolate ((HO)₂(O)P—S-5′); phosphorodithioate [—O₂PS₂—]; phosphonate [—PO(OH)₂—]; phosphoramidate [—O═P(OH)₂—]; mesyl phosphoramidate (CH₃)(SO₂)(N)P(O)₂—O-5′); any additional combination of oxygen/sulfur replaced monophosphate, diphosphate and triphosphates (e.g., 5′-alpha-thiotriphosphate, 5′-gamma-thiotriphosphate, etc.), 5′-phosphoramidates ((HO)₂(O)P—NH-5′, (HO)(NH₂)(O)P—O-5′), 5′-alkylphosphonates (R=alkyl=methyl, ethyl, isopropyl, propyl, etc., e.g., RP(OH)(O)—O-5′-, 5′-alkenylphosphonates (i.e. vinyl, substituted vinyl), (OH)₂(O)P-5′-CH2-), 5′-alkyletherphosphonates (R=alkylether=methoxymethyl (MeOCH2-), ethoxymethyl, etc., e.g., RP(OH)(O)—O-5′-). In some embodiments, the modification can be placed in the antisense strand of a dsRNA agent.

[0169] Other modifications and patterns of modifications can be found in, for example, U.S. Pat. No. 10,233,448, which is hereby incorporated by reference. Other modifications and patterns of modifications can be found in, for example, Anderson et al., Nucleic Acids Research 2021, 49 (16), 9026-9041, which is hereby incorporated by reference. Other modifications and patterns of modifications can be found in, for example, PCT Publication No. WO2021/030778, which is hereby incorporated by reference. Other modifications and patterns of modifications can be found in, for example, PCT Publication No. WO2021/030763, which is hereby incorporated by reference.

[0170] In some embodiments, the sequence of the oligonucleotide molecule is at least 40%, 50%, 55%, 60%, 65%, 70%, 75%, 80%, 85%, 90%, 95%, 98%, 99%, or 99.5% complementary to a target sequence of CD40. In some embodiments, the target sequence of CD40 is a nucleic acid sequence of about 10-50 base pair length, about 15-50 base pair length, 15-40 base pair length, 15-30 base pair length, or 15-25 base pair length sequences in CD40, in which the first nucleotide of the target sequence starts at any nucleotide in CD40 mRNA transcript in the coding region, or in the 5′ or 3′-untranslated region (UTR). For example, the first nucleotide of the target sequence can be selected so that it starts at the nucleic acid location (nal, number starting from the 5′ end of the full length of CD40 mRNA, e.g., the 5′-end first nucleotide is nal 1) 1, nal 2, nal 3, nal 4, nal 5, nal 6, nal 7, nal 8, nal 9, nal 10, nal 11, nal 12, nal 13, nal 14, nal 15, nal 15, nal 16, nal 17, or any other nucleic acid location in the coding or noncoding regions (5′ or 3′-untranslated region) of CD40 mRNA. In some embodiments, the first nucleotide of the target sequence can be selected so that it starts at a location within, or between, nal 10-nal 15, nal 10-nal 20, nal 50-nal 60, nal 55-nal 65, nal 75-nal 85, nal 95-nal 105, nal 135-nal 145, nal 155-nal 165, nal 225-nal 235, nal 265-nal 275, nal 275-nal 245, nal 245-nal 255, nal 285-nal 335, nal 335-nal 345, nal 385-nal 395, nal 515-nal 525, nal 665-nal 675, nal 675-nal 685, nal 695-nal 705, nal 705-nal 715, nal 875-nal 885, nal 885-nal 895, nal 895-nal 905, nal 1035-nal 1045, nal 1045-nal 1055, nal 1125-nal 1135, nal 1135-nal 1145, nal 1145-nal 1155, nal 1155-nal 1165, nal 1125-nal 1135, nal 1155-nal 1165, nal 1225-nal 1235, nal 1235-nal 1245, nal 1275-nal 1245, nal 1245-nal 1255, nal 1265-nal 1275, nal 1125-nal 1135, nal 1155-nal 1165, nal 1225-nal 1235, nal 1235-nal 1245, nal 1275-nal 1245, nal 1245-nal 1255, nal 1265-nal 1275, nal 1275-nal 1285, nal 1335-nal 1345, nal 1345-nal 1355, nal 1525-nal 1535, nal 1535-nal 1545, nal 1605-nal 1615, nal 1615-c.1625, nal 1625-nal 1635, nal 1635-1735, nal 1735-1835, nal 1835-1935, nal. 1836-1856, nal 1935-2000, nal 2000-2100, nal 2100-2200, nal 2200-2260, nal 2260-2400, nal 2400-2500, nal 2500-2600, nal 2600-2700, nal 2700-2800, nal 2800-2500, nal 2500-2600, nal 2600-2700, nal 2700-2800, nal 2800-2860, etc. In some embodiments, the sequence of CD40 mRNA is provided as NCBI Reference Sequence: NM_001250.6 Homo sapiens CD40 molecule (CD40), transcript variant 1, mRNA:

(SEQ ID NO: 979)
AGTGGTCCTGCCGCCTGGTCTCACCTCGCTATGGTTCGTCTGCCTCTGCAGTGCGTC
CTCTGGGGCTGCTTGCTGACCGCTGTCCATCCAGAACCACCCACTGCATGCAGAGAAAAACA
GTACCTAATAAACAGTCAGTGCTGTTCTTTGTGCCAGCCAGGACAGAAACTGGTGAGTGACT
GCACAGAGTTCACTGAAACGGAATGCCTTCCTTGCGGTGAAAGCGAATTCCTAGACACCTGG
AACAGAGAGACACACTGCCACCAGCACAAATACTGCGACCCCAACCTAGGGCTTCGGGTCCA
GCAGAAGGGCACCTCAGAAACAGACACCATCTGCACCTGTGAAGAAGGCTGGCACTGTACGA
GTGAGGCCTGTGAGAGCTGTGTCCTGCACCGCTCATGCTCGCCCGGCTTTGGGGTCAAGCAG
ATTGCTACAGGGGTTTCTGATACCATCTGCGAGCCCTGCCCAGTCGGCTTCTTCTCCAATGT
GTCATCTGCTTTCGAAAAATGTCACCCTTGGACAAGCTGTGAGACCAAAGACCTGGTTGTGC
AACAGGCAGGCACAAACAAGACTGATGTTGTCTGTGGTCCCCAGGATCGGCTGAGAGCCCTG
GTGGTGATCCCCATCATCTTCGGGATCCTGTTTGCCATCCTCTTGGTGCTGGTCTTTATCAA
AAAGGTGGCCAAGAAGCCAACCAATAAGGCCCCCCACCCCAAGCAGGAACCCCAGGAGATCA
ATTTTCCCGACGATCTTCCTGGCTCCAACACTGCTGCTCCAGTGCAGGAGACTTTACATGGA
TGCCAACCGGTCACCCAGGAGGATGGCAAAGAGAGTCGCATCTCAGTGCAGGAGAGACAGTG
AGGCTGCACCCACCCAGGAGTGTGGCCACGTGGGCAAACAGGCAGTTGGCCAGAGAGCCTGG
TGCTGCTGCTGCTGTGGCGTGAGGGTGAGGGGCTGGCACTGACTGGGCATAGCTCCCCGCTT
CTGCCTGCACCCCTGCAGTTTGAGACAGGAGACCTGGCACTGGATGCAGAAACAGTTCACCT
TGAAGAACCTCTCACTTCACCCTGGAGCCCATCCAGTCTCCCAACTTGTATTAAAGACAGAG
GCAGAAGTTTGGTGGTGGTGGTGTTGGGGTATGGTTTAGTAATATCCACCAGACCTTCCGAT
CCAGCAGTTTGGTGCCCAGAGAGGCATCATGGTGGCTTCCCTGCGCCCAGGAAGCCATATAC
ACAGATGCCCATTGCAGCATTGTTTGTGATAGTGAACAACTGGAAGCTGCTTAACTGTCCAT
CAGCAGGAGACTGGCTAAATAAAATTAGAATATATTTATACAACAGAATCTCAAAAACACTG
TTGAGTAAGGAAAAAAAGGCATGCTGCTGAATGATGGGTATGGAACTTTTTAAAAAAGTACA
TGCTTTTATGTATGTATATTGCCTATGGATATATGTATAAATACAATATGCATCATATATTG
ATATAACAAGGGTTCTGGAAGGGTACACAGAAAACCCACAGCTCGAAGAGTGGTGACGTCTG
GGGTGGGGAAGAAGGGTCTGGGGGAGGGTTGGTTAAAGGGAGATTTGGCTTTCCCATAATGC
TTCATCATTTTTCCCAAAAGGAGAGTGAATTCACATAATGCTTATGTAATTAAAAAATCATC
AAACATGTAAAAA.

[0171] In some embodiments, the antisense strand of the dsRNA agent is 100% complementary to a target RNA to hybridize thereto and inhibits its expression through RNA interference. The target RNA can be any RNA expressed in a cell. In another embodiment, the cell is a tumor cell, a liver cell, a muscle cell, an immune cell, a heart cell, or a cell of the central nervous system. In another embodiment, the antisense strand of the dsRNA agent is at least 99%, at least 98%, at least 97%, at least 96%, 95%, at least 90%, at least 85%, at least 80%, at least 75%, at least 70%, at least 65%, at least 60%, at least 55%, or at least 50% complementary to a target RNA. In some embodiments, the target RNA is CD40 RNA. In some embodiments, the siRNA molecule is an siRNA that reduces mRNA expression of CD40. In some embodiments, the siRNA molecule is an siRNA that reduces mRNA expression of CD40 and does not reduce expression of other RNAs by more than 50% in an assay described herein at a concentration of no more than 200 nm as described herein.

[0172] In some embodiments, the siRNA is linked to a protein, such as a FN3 domain. The siRNA can be linked to multiple FN3 domains that bind to the same target protein or different target proteins. In some embodiments, the linker is attached to the sense strand, which is used to facilitate the linkage of the sense strand to the FN3 domain.

[0173] In some embodiments, compositions are provided herein having a formula of (X₁)˜-(X₂)_{q}—(X₃)_{y}-L-X₄, wherein X₁ is a first FN3 domain, X₂ is A second FN3 domain, X₃ is a third FN3 domain or half-life extender molecule, L is a linker, and X₄ is a nucleic acid molecule, such as, but not limited to an siRNA molecule, wherein n, q, and y are each independently 0 or 1. In some embodiments, X₁, X₂, and X₃ bind to different target proteins. In some embodiments, y is 0. In some embodiments, n is 1, q is 0, and y is 0. In some embodiments, n is 1, q is 1, and y is 0. In some embodiments, n is 1, q is 1, and y is 1. In some embodiments, X₃ increases the half-life of the molecule as a whole as compared to a molecule without X₃. In some embodiments, the half-life extending moiety is an FN3 domain that binds to albumin. Examples of such FN3 domains include, but are not limited to, those described in U.S. Patent Application Publication No. 2017/0348397 and U.S. Pat. No. 9,156,887, which are hereby incorporated by reference in their entireties. The FN3 domains may incorporate other subunits, for example, via covalent interaction. In some embodiments, the FN3 domains further comprise a half-life extending moiety. Exemplary half-life extending moieties are albumin, albumin variants, albumin-binding proteins and/or domains, an aliphatic chain that binds to serum proteins, transferrin and fragments and analogues thereof, and Fe regions. Amino acid sequences of the human Fc regions are well known, and include IgG1, IgG2, IgG3, IgG4, IgM, IgA and IgE Fc regions. In some embodiments, the FN3 domains may incorporate a second FN3 domain that binds to a molecule that extends the half-life of the entire molecule, such as, but not limited to, any of the half-life extending moieties described herein. In some embodiments, the second FN3 domain binds to albumin, albumin variants, albumin-binding proteins and/or domains, and fragments and analogues thereof.

[0174] In some embodiments, compositions are provided herein having a formula of (X₁)—(X₂)-L-(X₄), wherein X₁ is a first FN3 domain, X₂ is a second FN3 domain, L is a linker, and X₄ is a nucleic acid molecule. In some embodiments, X₄ is an siRNA molecule. In some embodiments, X₁ is a FN3 domain that binds to CD71. In some embodiments, X₂ is a FN3 domain that binds to CD71. In some embodiments X₁ and X₂ do not bind to the same target protein. In some embodiments, X₁ and X₂ bind to the same target protein, but at different binding sites on the protein. In some embodiments, X₁ and X₂ bind to the same target protein. In some embodiments, X₁ and X₂ are FN3 domains that bind to CD71. In some embodiments, the composition does not comprise (e.g. is free of) a compound or protein that binds to ASGPR.

[0175] In some embodiments, compositions are provided herein having a formula of C—(X₁)ₙ—(X₂)_{q}[L-X₄]—(X₃)_{y}, wherein X₁ is a first FN3 domain; X₂ is a second FN3 domain; X₃ is a third FN3 domain or half-life extender molecule; L is a linker; X₄ is an oligonucleotide molecule; and C is a polymer, wherein n, q, and y are each independently 0 or 1, are provided.

[0176] In some embodiments, compositions are provided herein having a formula of (X₁)ₙ—(X₂)_{q}[L-X₄]—(X₃)_{y}—C, wherein X₁ is a first FN3 domain; X₂ is a second FN3 domain; X₃ is a third FN3 domain or half-life extender molecule; L is a linker; X₄ is an oligonucleotide molecule; and C is a polymer, wherein n, q, and y are each independently 0 or 1, are provided.

[0177] In some embodiments, compositions are provided herein having a formula of C—(X₁)ₙ—(X₂)_{q}[L-X₄]L-(X₃)_{y}, wherein X₁ is a first FN3 domain; X₂ is a second FN3 domain; X₃ is a third FN3 domain or half-life extender molecule; L is a linker; X₄ is an oligonucleotide molecule; and C is a polymer, wherein n, q, and y are each independently 0 or 1, are provided.

[0178] In some embodiments, compositions are provided herein having a formula of (X₁)˜-(X₂)_{q}[L-X₄]L-(X₃)_{y}—C, wherein X₁ is a first FN3 domain; X₂ is a second FN3 domain; X₃ is a third FN3 domain or half-life extender molecule; L is a linker; X₄ is an oligonucleotide molecule; and C is a polymer, wherein n, q, and y are each independently 0 or 1, are provided.

[0179] In some embodiments, compositions or complexes are provided having a formula of A₁-B₁, wherein A₁ has a formula of C-L₁-X_{S} and B₁ has a formula of X_{AS}-L₂-F₁, wherein:
[0180] C is a polymer, such as PEG;
[0181] L₁ and L₂ are each, independently, a linker;
[0182] X_{S} is a 5′ to 3′ oligonucleotide sense strand of a double stranded siRNA molecule;
[0183] X_{AS} is a 3′ to 5′ oligonucleotide antisense strand of a double stranded siRNA molecule;
[0184] F₁ is a polypeptide comprising at least one FN3 domain;
[0185] wherein X_{S} and X_{AS} form a double stranded oligonucleotide molecule to form the composition/complex.

[0186] In some embodiments, compositions or complexes are provided having a formula of A₁-B₁, wherein A₁ has a formula of X_{S} and B₁ has a formula of X_{AS}-L₂-F₁.

[0187] In some embodiments, compositions or complexes are provided having a formula of A₁-B₁, wherein A₁ has a formula of C-L₁-X_{S} and B₁ has a formula of X_{AS}.

[0188] In some embodiments, the sense strand is a sense strand as provided for herein. In some embodiments, the antisense strand is an antisense strand as provided for herein. In some embodiments, the sense and antisense strand form a double stranded siRNA molecule that targets CD40. In some embodiments, the double stranded oligonucleotide is about 21-23 nucleotides base pairs in length. In certain embodiments, C is optional.

[0189] In some embodiments, compositions or complexes are provided having a formula of A₁-B₁, wherein A₁ has a formula of F₁-L₁-X_{S} and B₁ has a formula of X_{AS}-L₂-C, wherein:
[0190] F₁ is a polypeptide comprising at least one FN3 domain;
[0191] L₁ and L₂ are each, independently, a linker;
[0192] C is a polymer, such as PEG;
[0193] X_{S} is a 5′ to 3′ oligonucleotide sense strand of a double stranded siRNA molecule;
[0194] X_{AS} is a 3′ to 5′ oligonucleotide antisense strand of a double stranded siRNA molecule;
[0195] wherein X_{S} and X_{AS} form a double stranded oligonucleotide molecule to form the composition/complex. In certain embodiments, C is optional.

[0196] In some embodiments, compositions or complexes are provided having a formula of A₁-B₁, wherein A₁ has a formula of X_{S} and B₁ has a formula of X_{AS}-L₂-C.

[0197] In some embodiments, compositions or complexes are provided having a formula of A₁-B₁, wherein A₁ has a formula of F₁-L₁-X_{S} and B₁ has a formula of X_{AS}.

[0198] In some embodiments, A₁ and B₁ interact with each other through hydrogen bonding. In some embodiments, A₁ and B₁ interact with each other through Watson-Crick base pairing.

[0199] In some embodiments, compositions described a polymer (polymer moiety C, or just C). In some embodiments, C can be a molecule that extends the half-life of the molecule. In some embodiments, the polymer is a natural or synthetic polymer, consisting of long chains of branched or unbranched monomers, and/or cross-linked network of monomers in two or three dimensions In some instances, the polymer includes a polysaccharide, lignin, rubber, or polyalkylene oxide (e.g., polyethylene glycol). In some instances, the at least one polymer includes, but is not limited to, alpha-, omega-dihydroxylpolyethyleneglycol, biodegradable lactone-based polymer, e.g. polyacrylic acid, polylactide acid (PLA), poly(glycolic acid) (PGA), polypropylene, polystyrene, polyolefin, polyamide, polycyanoacrylate, polyimide, polyethylenterephthalat (PET, PETG), polyethylene terephthalate (PETE), polytetramethylene glycol (PTG), or polyurethane as well as mixtures thereof. As used herein, a mixture refers to the use of different polymers within the same compound as well as in reference to block copolymers. In some cases, block copolymers are polymers wherein at least one section of a polymer is build up from monomers of another polymer. In some instances, the polymer comprises polyalkylene oxide. In some instances, the polymer comprises PEG. In some instances, the polymer comprises polyethylene imide (PEI) or hydroxy ethyl starch (HES).

[0200] In some embodiments, C is a PEG moiety. In some embodiments, the PEG moiety is conjugated at the 5′ terminus of the oligonucleotide molecule while the binding moiety is conjugated at the 3′ terminus of the oligonucleotide molecule. In some embodiments, the PEG moiety is conjugated at the 3′ terminus of the oligonucleotide molecule while the binding moiety is conjugated at the 5′ terminus of the oligonucleotide molecule. In some embodiments, the PEG moiety is conjugated to an internal site of the oligonucleotide molecule. In some embodiments, the PEG moiety, the binding moiety, or a combination thereof, are conjugated to an internal site of the oligonucleotide molecule. In some embodiments, the conjugation is a direct conjugation. In some embodiments, the conjugation is via native ligation.

[0201] In some embodiments, the polyalkylene oxide (e.g., PEG) is a polydisperse or monodisperse compound. In some embodiments, polydisperse material comprises disperse distribution of different molecular weight of the material, characterized by mean weight (weight average) size and dispersity. In some embodiments, the monodisperse PEG comprises one size of molecules. In some embodiments, C is poly- or monodispersed polyalkylene oxide (e.g., PEG) and the indicated molecular weight represents an average of the molecular weight of the polyalkylene oxide, e.g., PEG, molecules.

[0202] In some embodiments, the molecular weight of the polyalkylene oxide (e.g., PEG) is about 200, 300, 400, 500, 600, 700, 800, 900, 1000, 1100, 1200, 1300, 1400, 1450, 1500, 1600, 1700, 1800, 1900, 2000, 2100, 2200, 2300, 2400, 2500, 2600, 2700, 2800, 2900, 3000, 3250, 3350, 3500, 3750, 4000, 4250, 4500, 4600, 4750, 5000, 5500, 6000, 6500, 7000, 7500, 8000, 10,000, 12,000, 20,000, 35,000, 40,000, 50,000, 60,000, or 100,000 Da.

[0203] In some embodiments, C is polyalkylene oxide (e.g., PEG) and has a molecular weight of about 200, 300, 400, 500, 600, 700, 800, 900, 1000, 1100, 1200, 1300, 1400, 1450, 1500, 1600, 1700, 1800, 1900, 2000, 2100, 2200, 2300, 2400, 2500, 2600, 2700, 2800, 2900, 3000, 3250, 3350, 3500, 3750, 4000, 4250, 4500, 4600, 4750, 5000, 5500, 6000, 6500, 7000, 7500, 8000, 10,000, 12,000, 20,000, 35,000, 40,000, 50,000, 60,000, or 100,000 Da. In some embodiments, C is PEG and has a molecular weight of about 200, 300, 400, 500, 600, 700, 800, 900, 1000, 1100, 1200, 1300, 1400, 1450, 1500, 1600, 1700, 1800, 1900, 2000, 2100, 2200, 2300, 2400, 2500, 2600, 2700, 2800, 2900, 3000, 3250, 3350, 3500, 3750, 4000, 4250, 4500, 4600, 4750, 5000, 5500, 6000, 6500, 7000, 7500, 8000, 10,000, 12,000, 20,000, 35,000, 40,000, 50,000, 60,000, or 100,000 Da. In some embodiments, the molecular weight of C is about 200 Da. In some embodiments, the molecular weight of C is about 300 Da. In some embodiments, the molecular weight of C is about 400 Da. In some embodiments, the molecular weight of C is about 500 Da. In some embodiments, the molecular weight of C is about 600 Da. In some embodiments, the molecular weight of C is about 700 Da. In some embodiments, the molecular weight of C is about 800 Da. In some embodiments, the molecular weight of C is about 900 Da. In some embodiments, the molecular weight of C is about 1000 Da. In some embodiments, the molecular weight of C is about 1100 Da. In some embodiments, the molecular weight of C is about 1200 Da. In some embodiments, the molecular weight of C is about 1300 Da. In some embodiments, the molecular weight of C is about 1400 Da. In some embodiments, the molecular weight of C is about 1450 Da. In some embodiments, the molecular weight of C is about 1500 Da. In some embodiments, the molecular weight of C is about 1600 Da. In some embodiments, the molecular weight of C is about 1700 Da. In some embodiments, the molecular weight of C is about 1800 Da. In some embodiments, the molecular weight of C is about 1900 Da. In some embodiments, the molecular weight of C is about 2000 Da. In some embodiments, the molecular weight of C is about 2100 Da. In some embodiments, the molecular weight of C is about 2200 Da. In some embodiments, the molecular weight of C is about 2300 Da. In some embodiments, the molecular weight of C is about 2400 Da. In some embodiments, the molecular weight of C is about 2500 Da. In some embodiments, the molecular weight of C is about 2600 Da. In some embodiments, the molecular weight of C is about 2700 Da. In some embodiments, the molecular weight of C is about 2800 Da. In some embodiments, the molecular weight of C is about 2900 Da. In some embodiments, the molecular weight of C is about 3000 Da. In some embodiments, the molecular weight of C is about 3250 Da. In some embodiments, the molecular weight of C is about 3350 Da. In some embodiments, the molecular weight of C is about 3500 Da. In some embodiments, the molecular weight of C is about 3750 Da. In some embodiments, the molecular weight of C is about 4000 Da. In some embodiments, the molecular weight of C is about 4250 Da. In some embodiments, the molecular weight of C is about 4500 Da. In some embodiments, the molecular weight of C is about 4600 Da. In some embodiments, the molecular weight of C is about 4750 Da. In some embodiments, the molecular weight of C is about 5000 Da. In some embodiments, the molecular weight of C is about 5500 Da. In some embodiments, the molecular weight of C is about 6000 Da. In some embodiments, the molecular weight of C is about 6500 Da. In some embodiments, the molecular weight of C is about 7000 Da. In some embodiments, the molecular weight of C is about 7500 Da. In some embodiments, the molecular weight of C is about 8000 Da. In some embodiments, the molecular weight of C is about 10,000 Da. In some embodiments, the molecular weight of C is about 12,000 Da. In some embodiments, the molecular weight of C is about 20,000 Da. In some embodiments, the molecular weight of C is about 35,000 Da. In some embodiments, the molecular weight of C is about 40,000 Da. In some embodiments, the molecular weight of C is about 50,000 Da. In some embodiments, the molecular weight of C is about 60,000 Da. In some embodiments, the molecular weight of C is about 100,000 Da.

[0204] In some embodiments, the polyalkylene oxide (e.g., PEG) is a discrete PEG, in which the discrete PEG is a polymeric PEG comprising more than one repeating ethylene oxide units. In some embodiments, a discrete PEG (dPEG) comprises from 2 to 60, from 2 to 50, or from 2 to 48 repeating ethylene oxide units. In some embodiments, a dPEG comprises about 2, 3, 4, 5, 6, 7, 8, 9, 10, 11, 12, 13, 14, 15, 16, 17, 18, 19, 20, 22, 24, 26, 28, 30, 35, 40, 42, 48, 50 or more repeating ethylene oxide units. In some embodiments, a dPEG comprises about 2 or more repeating ethylene oxide units. In some embodiments, a dPEG comprises about 3 or more repeating ethylene oxide units. In some embodiments, a dPEG comprises about 4 or more repeating ethylene oxide units. In some embodiments, a dPEG comprises about 5 or more repeating ethylene oxide units. In some embodiments, a dPEG comprises about 6 or more repeating ethylene oxide units. In some embodiments, a dPEG comprises about 7 or more repeating ethylene oxide units. In some embodiments, a dPEG comprises about 8 or more repeating ethylene oxide units. In some embodiments, a dPEG comprises about 9 or more repeating ethylene oxide units. In some embodiments, a dPEG comprises about 10 or more repeating ethylene oxide units. In some embodiments, a dPEG comprises about 11 or more repeating ethylene oxide units. In some embodiments, a dPEG comprises about 12 or more repeating ethylene oxide units. In some embodiments, a dPEG comprises about 13 or more repeating ethylene oxide units. In some embodiments, a dPEG comprises about 14 or more repeating ethylene oxide units. In some embodiments, a dPEG comprises about 15 or more repeating ethylene oxide units. In some embodiments, a dPEG comprises about 16 or more repeating ethylene oxide units. In some embodiments, a dPEG comprises about 17 or more repeating ethylene oxide units. In some embodiments, a dPEG comprises about 18 or more repeating ethylene oxide units. In some embodiments, a dPEG comprises about 19 or more repeating ethylene oxide units. In some embodiments, a dPEG comprises about 20 or more repeating ethylene oxide units. In some embodiments, a dPEG comprises about 22 or more repeating ethylene oxide units. In some embodiments, a dPEG comprises about 24 or more repeating ethylene oxide units. In some embodiments, a dPEG comprises about 26 or more repeating ethylene oxide units. In some embodiments, a dPEG comprises about 28 or more repeating ethylene oxide units. In some embodiments, a dPEG comprises about 30 or more repeating ethylene oxide units. In some embodiments, a dPEG comprises about 35 or more repeating ethylene oxide units. In some embodiments, a dPEG comprises about 40 or more repeating ethylene oxide units. In some embodiments, a dPEG comprises about 42 or more repeating ethylene oxide units. In some embodiments, a dPEG comprises about 48 or more repeating ethylene oxide units. In some embodiments, a dPEG comprises about 50 or more repeating ethylene oxide units. In some cases, a dPEG is synthesized as a single molecular weight compound from pure (e.g., about 95%, 98%, 99%, or 99.5%) staring material in a step-wise fashion. In some cases, a dPEG has a specific molecular weight, rather than an average molecular weight. In some cases, a dPEG described herein is a dPEG from Quanta Biodesign, LMD.

[0205] In some embodiments, C is an albumin binding domain. In some embodiments, the albumin binding domain specifically binds to serum albumin, e.g., human serum albumin (HSA), to prolong the half-life of the domain or of another therapeutic to which the albumin-binding domain is associated with or linked to. In some embodiments, the human serum albumin-binding domain comprises an initiator methionine (Met) linked to the N-terminus of the molecule. In some embodiments, the human serum albumin-binding domain comprises a cysteine (Cys) linked to a C-terminus or the N-terminus of the domain. The addition of the N-terminal Met and/or the C-terminal Cys may facilitate expression and/or conjugation to another molecule, which can be another half-life extending molecule, such as PEG, a Fc region, and the like.

[0206] In some embodiments, the albumin binding domain comprises the amino acid sequence of SEQ ID NOs: 5, 6, 7, 8, 9, 10, 11, 12, 13, 14, 15, 16, 17, 18, 19, 20, 21, 22, or 23, provided in Table 1. In some embodiments, the albumin binding domain (protein) is isolated. In some embodiments, the albumin binding domain comprises an amino acid sequence that is at least, or is, 85%, 86%, 87%, 88%, 89%, 90%, 91%, 92%, 93%, 94%, 95%, 96%, 97%, 98%, or 99% identical to the amino acid sequence of SEQ ID NOs: 5, 6, 7, 8, 9, 10, 11, 12, 13, 14, 15, 16, 17, 18, 19, 20, 21, 22, or 23. In some embodiments, the albumin binding domain comprises an amino acid sequence that is at least, or is, 85%, 86%, 87%, 88%, 89%, 90%, 901%, 92%, 93%, 94%, 95%, 96%, 97%, 98%, or 99% identical to the amino acid sequence of SEQ ID NOs: 5, 6, 7, 8, 9, 10, 11, 12, 13, 14, 15, 16, 17, 18, 19, 20, 21, 22, or 23 provided that the protein has a substitution that corresponds to position 10 of SEQ ID NOs: 5, 6, 7, 8, 9, 10, 11, 12, 13, 14, 15, 16, 17, 18, 19, 20, 21, 22, or 23. In some embodiments, the substitution is A10V. In some embodiments, the substitution is A10G, A10L, A10I, A10T, or A10S. In some embodiments, the substitution at position 10 is any naturally occurring amino acid. In some embodiments, the isolated albumin binding domain comprises an amino acid sequence that has 1, 2, 3, 4, 5, 6, 7, 8, 9, 10, 11, 12, 13, or 14 substitutions when compared to the amino acid sequence of SEQ ID NOs: 5, 6, 7, 8, 9, 10, 11, 12, 13, 14, 15, 16, 17, 18, 19, 20, 21, 22, or 23. In some embodiments, the substitution is at a position that corresponds to position 10 of SEQ ID NOs: 5, 6, 7, 8, 9, 10, 11, 12, 13, 14, 15, 16, 17, 18, 19, 20, 21, 22, or 23. In some embodiments, FN3 domains provided comprise a cysteine residue in at least one residue position corresponding to residue positions 6, 11, 22, 25, 26, 52, 53, 61, 88 or positions 6, 8, 10, 11, 14, 15, 16, 20, 30, 34, 38, 40, 41, 45, 47, 48, 53, 54, 59, 60, 62, 64, 70, 88, 89, 90, 91, or 93 of SEQ ID NOs: 5, 6, 7, 8, 9, 10, 11, 12, 13, 14, 15, 16, 17, 18, 19, 20, 21, 22, or 23, or at a C-terminus. Although the positions are listed in a series, each position can also be chosen individually. In some embodiments, the cysteine is at a position that corresponds to position 6, 53, or 88. In some embodiments, additional examples of albumin binding domains can be found in U.S. Pat. No. 10,925,932, which is hereby incorporated by reference in its entirety. In some embodiments, additional examples of albumin binding domains can be found in U.S. Pat. Nos. 8,969,289, 9,540,424, 10,221,438, 10,934,572, 10,442,851, 11,203,630, 10,766,946, 11,434,275; and in U.S.

[0207] Publication Nos. 2022/0204589 and 2023/0145413; each of which is hereby incorporated by reference in its entirety.

TABLE 1
Albumin-binding Domain Sequences

| SEQ ID | |
|---|---|
| NO: | SEQUENCE |
| 5 | MLPAPKNLVASRVTEDSARLSWTAPDAAFDSFNIAYWEPGIGGEAIWLRVPGS |
| | ERSYDLTGLKPGTEYKVWIHGVKGGASSPPLIARFTT |
| 6 | MLPAPKNLVVSRVTEDSARLSWTAPDAAFDSFNIAYWEPGIGGEAIWLRVPGS |
| | ERSYDLIGLKPGTEYKVWIHGVKGGASSPPLIARFTT |
| 7 | MLPAPKNLVVSRVTEDSARLSWTAPDAAFDSFAIAYWEPGIGGEAIWLRVPGS |
| | ERSYDLTGLKPGTEYKVWIHGVKGGASSPPLIARFTT |
| 8 | MLPAPKNLVVSRVTEDSARLSWTAPDAAFDSFNISYWEPGIGGEAIWLRVPGS |
| | ERSYDLTGLKPGTEYKVWIHGVKGGASSPPLIARFTT |
| 9 | MLPAPKNLVVSRVTEDSARLSWTAPDAAFDSENIAYAEPGIGGEAIWLRVPGS |
| | RSYDLTGLKPGTEYKVWIHGVKGGASSPPLIARFTT |
| 10 | MLPAPKNLVVSRVTEDSARLSWTAPDAAFDSENIAYWEAGIGGEAIWLRVPGS |
| | ERSYDLTGLKPGTEYKVWIHGVKGGASSPPLIARFTT |
| 11 | MLPAPKNLVVSRVTEDSARLSWTAPDAAFDSENIAYWEPAIGGEAIWLRVPGS |
| | ERSYDLTGLKPGTEYKVWIHGVKGGASSPPLIARFTT |
| 12 | MLPAPKNLVVSRVTEDSARLSWTAPDAAFDSFNIAYWEPGAGGEAIWLRVPGS |
| | ERSYDLTGLKPGTEYKVWIHGVKGGASSPPLIARFTT |
| 13 | MLPAPKNLVVSRVTEDSARLSWTAPDAAFDSFNIAYWEPGIAGEAIWLRVPGS |
| | ERSYDLTGLKPGTEYKVWIHGVKGGASSPPLIARFTT |
| 14 | MLPAPKNLVVSRVTEDSARLSWTAPDAAFDSENIAYWEPGIGGEAIALRVPGS |
| | ERSYDLTGLKPGTEYKVWIHGVKGGASSPPLIARFTT |
| 15 | MLPAPKNLVVSRVTEDSARLSWTAPDAAFDSENIAYWEPGIGGEAIWLAVPGS |
| | ERSYDLTGLKPGTEYKVWIHGVKGGASSPPLIARFTT |
| 16 | MLPAPKNLVVSRVTEDSARLSWTAPDAAFDSFNIAYWEPGIGGEAIWLRVPGS |
| | ERSYDLTGLKPGTEYAVWIHGVKGGASSPPLIARFTT |
| 17 | MLPAPKNLVVSRVTEDSARLSWTAPDAAFDSFNIAYWEPGIGGEAIWLRVPGS |
| | ERSYDLTGLKPGTEYKVAIHGVKGGASSPPLIARFTT |
| 18 | MLPAPKNLVVSRVTEDSARLSWTAPDAAFDSENIAYWEPGIGGEAIWLRVPGS |
| | ERSYDLTGLKPGTEYKVWIAGVKGGASSPPLIARFTT |
| 19 | MLPAPKNLVVSRVTEDSARLSWTAPDAAFDSENIAYWEPGIGGEAIWLRVPGS |
| | ERSYDLTGLKPGTEYKVWIHGVKGGSSSPPLIARFTT |
| 20 | MLPAPKNLVVSRVTEDSARLSWTAPDAAFDSFNIAYWEPGIGGEAIWLRVPGS |
| | ERSYDLTGLKPGTEYKVWIHGVKGGAASPPLIARFTT |
| 21 | MLPAPKNLVVSRVTEDSARLSWTAPDAAFDSFNIAYWEPGIGGEAIWLRVPGS |
| | ERSYDLTGLKPGTEYKVWIHGVKGGASSAPLIARFTT |
| 22 | MLPAPKNLVVSRVTEDSARLSWTAPDAAFDSFNIAYWEPGIGGEAIWLRVPGS |
| | ERSYDLTGLKPGTEYKVWIHGVKGGASSPPLAARFTT |
| 23 | MLPAPKNLVVSRVTEDSARLSWTAPDAAFDSENIAYWEPGIGGEAIWLRVPGS |
| | ERSYDLTGLKPGTEYKVWIHGVKGGASSPPLIAAFTT |

[0208] In some embodiments, C can also be Endoporter, INF-7, TAT, polyarginine, polylysine, or an amphipathic peptide. These moieties can be used in place of or in addition to other half-life extending moieties provided for herein. In some embodiments, C can be a molecule that delivers the complex into the cell, the endosome, or the ER; said molecules are selected from those peptides listed in Table 2.

TABLE 2

| SEQ ID | | |
|---|---|---|
| NO: | NAME | SEQUENCE |
| 24 | TAT | RKKRRQRRR |
| 25 | Penetratin | RQIKIWFQNRRMKWKK |
| 26 | Transportan | GWTLNSAGYLLGKINKALAALAKKIL |
| 27 | MAP | KLALKLALKALKAALKLA |
| 28 | Pep-1 | KETWWETWWTEWSQPKKKRKV |
| 29 | KDEL | KDEL |
| 30 | GALA | WEAALAEALAELAEHLAEALAEALEALAA |
| 31 | HA2 | GDIMGEWGNEIFGAIAGELGC |
| 32 | Aurine 1.2 | GLFDIIKKIAESF |
| 33 | MPG | GALFLGWLGAAGSTMGAPKSKRKV |
| 34 | TP-10 | AGYLLGKINLKALAALAKKIL |
| 35 | EB-1 | LIRLWSHLIHIWFQNRRLKWKKK |
| 36 | HA2- | GLFGAIAGFIENGWEGMIDGRQIKIWFQNRRMKWKK |
| | Penetratin | |
| 37 | Endosomolytic | FFKKLAHALHLLALLALHLAHALKKA |
| 38 | Endosomolytic | LFEAIEGFIENGWGMIDGWYG |
| 39 | Endosomolytic | LFEAIEGFIENGWEGMIDGWYGRKKRRQRRR |
| 40 | Endosomolytic | IGAVLKVLTTGLPALISWIKRKRQQ |
| 41 | ER Targeting | MKLAVTLTLVTLALSSSSASA |
| 42 | ER Targeting | RLIEDICLPRWGCLWEDDKDEL |
| 43 | ER Targeting | MIRTLLLSTLVAGALSK |
| 44 | ER Targeting | ILSSLTVTOLLRRLHQWIK |
| 45 | ER Targeting | MIRTLLLSTLVAGALSKDEL |

[0209] In some embodiments, L₁ is any linker that can be used to link the polymer C to the sense strand X_{S} or to link the polypeptide of F₁ to the sense strand X_{S}. In some embodiments, L₁ has a formula of:

[chemical structure]

[chemical structure]

wherein X_{S}, X_{AS}, and F₁ are as defined above.

[0210] In some embodiments, n=0-20. In some embodiments, R and R1 are independently methyl. In some embodiments, R and R1 are independently present or both are absent. In some embodiments, X and Y are independently S. In some embodiments, X and Y are independently present or absent. In some embodiments, Peptide is an enzymatically cleavable peptide, such as, but not limited to, Val-Cit, Val-Ala, etc.

[0211] In some embodiments, L₂ is any linker that can be used to link the polypeptide of F1 to the antisense strand X_{AS} or to link the polymer C to the antisense strand X_{AS}. In some embodiments, L₂ has a formula of in the complex of:

[chemical structure]

wherein X_{AS} and F₁ are as defined above.

[0212] In some embodiments, n=0-20. In some embodiments, R and R1 are independently methyl. In some embodiments, R and R1 are independently present or both are absent. In some embodiments, X and Y are independently S. In some embodiments, X and Y are independently present or absent. In some embodiments, Peptide is an enzymatically cleavable peptide, such as, but not limited to, Val-Cit, Val-Ala, etc.

[0213] In some embodiments, the linker is covalently attached to F1 through a cysteine residue present on F1, which can be illustrated as follows:

[chemical structure]

wherein X_{S} is a 5′ to 3′ oligonucleotide sense strand of a double stranded siRNA molecule; X_{AS} is a 3′ to 5′ oligonucleotide antisense strand of a double stranded siRNA molecule; and F₁ is a polypeptide comprising at least one FN3 domain, wherein X_{S} and X_{AS} form a double stranded siRNA molecule.

[0214] In some embodiments, A₁-B₁ has a formula of:

[chemical structure]

wherein C is the polymer, such as PEG, Endoporter, INF-7, TAT, polyarginine, polylysine, an amphipathic peptide, or as provided for herein; and F₁ is a polypeptide comprising at least one FN3 domain. The sense and antisense strands are represented by the “N” notations, wherein each nucleotide represented by N, is independently, A, U, C, or G or a modified nucleobase, such as those provided for herein. The N₁ nucleotides of the sense strand and the antisense strand represent the 5′ end of the respective strands. For clarity, although Formula III utilizes N₁, N₂, N₃, etc., in both the sense and the antisense strand, the nucleotide bases do not need to be the same and are not intended to be the same. The siRNA that is illustrated in Formula III would be complementary to a target sequence. For example, in some embodiments, the sense strand comprises a 2′O-methyl modified nucleotide with a phosphorothioate (PS) modified backbone at N₁ and N₂, a 2′-fluoro modified nucleotide at N₃, N₇, N₈, N₉, N₁₂, and N₁₇, and a 2′O-methyl modified nucleotide at N₄, N₅, N₆, N₁₀, N₁₁, N₁₃, N₁₄, N₁₅, N₁₆, Nis, and N₁₉.

[0215] In some embodiments, the antisense strand comprises a vinyl phosphonate moiety attached to N₁, a 2′fluoro-modified nucleotide with a phosphorothioate (PS) modified backbone at N₂, a 2′O-methyl modified nucleotide at N₃, N₄, N₅, N₆, N₇, N₈, N₉, N₁₀, N₁₁, N₁₂, N₁₃, N₁₅, N₁₆, N₁₇, N₁₈, and N₁₉, a 2′fluoro-modified nucleotide at N₁₄, and a 2′O-methyl modified nucleotide with a phosphorothioate (PS) modified backbone at N₂₀ and N₂₁.

[0216] In some embodiments, a compound having a formula of:

[chemical structure]

is provided.

[0217] In some embodiments, a compound having a formula of:

[chemical structure]

is provided, wherein F₁ is a polypeptide comprising at least one FN3 domain and is conjugated to a linker. The linker illustrated above, is a non-limiting example, and other types of linkers can be used.

[0218] In some embodiments, F₁ comprises polypeptide having a formula of (X₁)ₙ—(X₂)_{q}—(X₃)_{y}, wherein X₁ is a first FN3 domain; X₂ is second FN3 domain; X₃ is a third FN3 domain or half-life extender molecule; wherein n, q, and y are each independently 0 or 1, provided that at least one of n, q, and y is 1. In some embodiments, n, q, and y are each 1. In some embodiments, n and q are 1 and y is 0. In some embodiments n and y are 1 and q is 0.

[0219] In some embodiments, X₁ is a CD71 binding FN3 domain, such as one provided herein. In some embodiments, X₂ is a CD71 binding FN3 domain. In some embodiments, X₁ and X₂ are different CD71 binding FN3 domains. In some embodiments, the binding domains are the same. In some embodiments, X₃ is a FN3 domain that binds to human serum albumin. In some embodiments, X₃ is an Fc domain without effector function that extends the half-life of a protein. In some embodiments, X₁ is a first CD71 binding FN3 domain, X₂ is a second CD71 binding FN3 domain, and X₃ is an albumin binding FN3 domain. Examples of such polypeptides are provided herein and below. In some embodiments, compositions are provided herein having a formula of C—(X₁)ₙ—(X₂)_{q}—(X₃)_{y}-L-X₄, wherein C is a polymer, such as PEG, Endoporter, INF-7, TAT, polyarginine, polylysine, an amphipathic peptide, or peptides provided in Table 2; X₁ is a first FN3 domain; X₂ is a second FN3 domain; X₃ is a third FN3 domain or half-life extender molecule; L is a linker; and X₄ is a nucleic acid molecule, wherein n, q, and y are each independently 0 or 1.

[0220] In some embodiments, compositions are provided herein having a formula of (X₁)˜-(X₂)_{q}—(X₃)_{y}-L-X₄—C, wherein X₁ is a first FN3 domain; X₂ is a second FN3 domain; X₃ is a third FN3 domain or half-life extender molecule; L is a linker; X₄ is a nucleic acid molecule; and C is a polymer, wherein n, q, and y are each independently 0 or 1.

[0221] In some embodiments, compositions are provided herein having a formula of X₄-L-(X₁)ₙ—(X₂)_{q}—(X₃)_{y}, wherein X₁ is a first FN3 domain; X₂ is a second FN3 domain; X₃ is a third FN3 domain or half-life extender molecule; L is a linker; and X₄ is a nucleic acid molecule, wherein n, q, and y are each independently 0 or 1.

[0222] In some embodiments, compositions are provided herein having a formula of C-X₄-L-(X₁)ₙ—(X₂)_{q}—(X₃)_{y}, wherein C is a polymer; X₁ is a first FN3 domain; X₂ is a second FN3 domain; X₃ is a third FN3 domain or half-life extender molecule; L is a linker; and X₄ is a nucleic acid molecule, wherein n, q, and y are each independently 0 or 1.

[0223] In some embodiments, compositions are provided herein having a formula of X₄-L-(X₁)ₙ—(X₂)_{q}—(X₃)_{y}—C, wherein X₁ is a first FN3 domain; X₂ is a second FN3 domain; X₃ is a third FN3 domain or half-life extender molecule; L is a linker; X₄ is a nucleic acid molecule; and C is a polymer, wherein n, q, and y are each independently 0 or 1.

[0224] In some embodiments, the CD40 binding siRNA molecule comprises a sequence pair that may follow the sequence: sense strand (5′-3′) nsnsnnnnNfNfNfnnnnnnnnsnsa or (5′-3′) nsnsnnnnNfNfNfnnnnnnnnna; and antisense strand (5′-3′) UfsNfsnnnNfnnnnnnnNfnNfnnnsusu, wherein (n) is 2′-O-Me (methyl), (Nf) is 2′-F (fluoro), (s) is phosphorothioate backbone modification. Each nucleotide in both the sense and antisense strands may be modified independently or in combination at ribosugar and nucleobase positions.

[0225] In some embodiments, the siRNA molecule comprises a sequence pair from Table 3A, Table 3B, Table 4A, or Table 4B. In some embodiments, Tables 5A and 5B depict non-limiting examples of sequence pairs wherein the sense strand comprises a linker molecule. In some embodiments, any siRNA molecule provided for herein may comprise a linker molecule as disclosed herein.

[0226] In some embodiments, the siRNA molecule comprises a sense strand comprising the nucleic acid sequence of SEQ ID NO: 1890 and an antisense strand comprising the nucleic acid sequence of SEQ ID NO: 2290. In some embodiments, the siRNA molecule comprises a linker at the 3′ end of the sense strand. In some embodiments, the linker is C₆-NH2-Propyl-Mal. In some embodiments, the siRNA molecule comprises the sequence pair H11 as set forth in Table 5B.

[0227] In some embodiments, the siRNA molecule comprises a sense strand comprising the nucleic acid sequence of SEQ ID NO: 1893 and an antisense strand comprising the nucleic acid sequence of SEQ ID NO: 2293. In some embodiments, the siRNA molecule comprises a linker at the 3′ end of the sense strand. In some embodiments, the linker is C₆—NH₂—Propyl-Mal. In some embodiments, the siRNA molecule comprises the sequence pair K11 as set forth in Table 5B.

[0228] In some embodiments, the siRNA molecule comprises a sense strand comprising the nucleic acid sequence of SEQ ID NO: 1941 and an antisense strand comprising the nucleic acid sequence of SEQ ID NO: 2051. In some embodiments, the siRNA molecule comprises a linker at the 5′ end of the sense strand. In some embodiments, the linker is C₆—NH₂—Propyl-Mal. In some embodiments, the siRNA molecule comprises the sequence pair 010 as set forth in Table 5B.

[0229] In some embodiments, the siRNA molecule comprises a sense strand comprising the nucleic acid sequence of SEQ ID NO: 1942 and an antisense strand comprising the nucleic acid sequence of SEQ ID NO: 2052. In some embodiments, the siRNA molecule comprises a linker at the 5′ end of the sense strand. In some embodiments, the linker is C₆—NH₂—Propyl-Mal. In some embodiments, the siRNA molecule comprises the sequence pair P10 as set forth in Table 5B.

[0230] In some embodiments, the siRNA molecule comprises a sense strand comprising the nucleic acid sequence of SEQ ID NO: 1944 and an antisense strand comprising the nucleic acid sequence of SEQ ID NO: 2054. In some embodiments, the siRNA molecule comprises a linker at the 5′ end of the sense strand. In some embodiments, the linker is C₆—NH₂—Propyl-Mal. In some embodiments, the siRNA molecule comprises the sequence pair R10 as set forth in Table 5B.

TABLE 3A
siRNA Sense and Antisense Sequences (Modified)

| siRNA | SEQ | | SEQ | |
|---|---|---|---|---|
| Pair | ID NO: | Sense Strand 5′-3′ | ID NO: | Antisense Strand 5′-3′ |
| A1 | 46 | [mA*][mG*][[A][mA][ | 179 | [fU*][fC*][mA][mu][ |
| | | mC][mC][fA][fC][fC] | | mG][mC][mA][mG][mU] |
| | | [mC][mA][fC][mU][mG | | [mG][mG][mG][mU][fG |
| | | ][mC][mA][fU][mG][m | | ][mG][mU][mU][mC][m |
| | | A][idT] | | U][*mU][*mU] |
| B1 | 47 | [mA*][mG*][fA][mA][ | 180 | [fU*][fA*][mU][mu][ |
| | | mA][mA][fA][fC][fA] | | mA][mG][mG][mU][mA] |
| | | [mG][mU][fA][mC][mC | | [mC][mU][mG][mU][fU |
| | | ][mU][mA][fA][mu][m | | ][mU][mU][mU][mC][m |
| | | A][idT] | | U][*mU][*mU] |
| C1 | 48 | [mG*][mA*][[A][mA][ | 181 | [fU*][fC*][mA][mG][ |
| | | mC][mU][fG][fG][fU] | | mU][mC][mA][mC][mU] |
| | | [mG][mA][fG][mu][mG | | [mC][mA][mC][mC][fA |
| | | ][mA][mC][fU][mG][m | | ][mG][mU][mU][mu][m |
| | | A][idT] | | C][*mU][*mU] |
| D1 | 49 | [mA*][mA*][fA][mC][ | 182 | [fU*][fG*][mC][mA][ |
| | | mU][mG][fG][fU][fG] | | mG][mU][mC][mA][mC] |
| | | [mA][mG][fU][mG][mA | | [mU][mC][mA][mC][fC |
| | | ][mC][mU][fG][mC][m | | ][mA][mG][mU][mU][m |
| | | A][idT] | | U][*mU][*mU] |
| E1 | 50 | [mA*][mG*][fU][mU][ | 183 | [fU*][fA*][mU][mu][ |
| | | mC][mA][fC][fU][fG] | | mC][mC][mG][mU][mU] |
| | | [mA][mA][fA][mC][mG | | [mU][mC][mA][mG][fU |
| | | ][mG][mA][fA][mU][m | | ][mG][mA][mA][mC][m |
| | | A][idT] | | U][*mU][*mU] |
| F1 | 51 | [mG*][mG*][fA][mA][ | 184 | [fU*][fC*][mC][mG][ |
| | | mU][mG][fC][fC][fU] | | mC][mA][mA][mG][mG] |
| | | [mU][mC][fC][mU][mU | | [mA][mA][mG][mG][fC |
| | | ][mG][mC][fG][mG][m | | ][mA][mU][mU][mC][m |
| | | A][idT] | | C][*mU][*mU] |
| G1 | 52 | [mU*][mG*][fC][mC][ | 185 | [fU*][fU*][mU][mC][ |
| | | mU][mU][fC][fC][fU] | | mA][mC][mC][mG][mC] |
| | | [mU][mG][fC][mG][mG | | [mA][mA][mG][mG][fA |
| | | ][mU][mG][fA][mA][m | | ][mA][mG][mG][mC][m |
| | | A][idT] | | A][*mU][*mU] |
| H1 | 53 | [mG*][mC*][fC][mU][ | 186 | [fU*][fU*][mU][mu][ |
| | | mU][mC][fC][fU][fU] | | mC][mA][mC][mC][mG] |
| | | [mG][mC][fG][mG][mU | | [mC][mA][mA][mG][fG |
| | | ][mG][mA][fA][mA][m | | ][mA][mA][mG][mG][m |
| | | A][idT] | | C][*mU][*mU] |
| I1 | 54 | [mC*][mC*][fU][mU][ | 187 | [fU*][fC*][mU][mU][ |
| | | mC][mC][fU][fU][fG] | | mU][mC][mA][mC][mC] |
| | | [mC][mG][fG][mU][mG | | [mG][mC][mA][mA][fG |
| | | ][mA][mA][fA][mG][m | | ][mG][mA][mA][mG][m |
| | | A][idT] | | G][*mU][*mU] |
| J1 | 55 | [mC*][mU*][fU][mC][ | 188 | [fU*][fG*][mC][mU][ |
| | | mC][mU][fU][[G][fC] | | mU][mU][mC][mA][mC] |
| | | [mG][mG][fU][mG][mA | | [mC][mG][mC][mA][fA |
| | | ][mA][mA][fG][mC][m | | ][mG][mG][mA][mA][m |
| | | A][idT] | | G][*mU][*mU] |
| K1 | 56 | [mU*][mU*][fC][mC][ | 189 | [fU*][fC*][mG][mC][ |
| | | mU][mU][fG][fC][fG] | | mU][mU][mU][mC][mA] |
| | | [mG][mU][fG][mA][mA | | [mC][mC][mG][mC][fA |
| | | ][mA][mG][fC][mG][m | | ][mA][mG][mG][mA][m |
| | | A][idT] | | A][*mU][*mU] |
| L1 | 57 | [mU*][mC*][fC][mU][ | 190 | [fU*][fU*][mC][mG][ |
| | | mU][mG][fC][fG][[G] | | mC][mU][mU][mU][mC] |
| | | [mU][mG][fA][mA][mA | | [mA][mC][mC][mG][fC |
| | | ][mG][mC][fG][mA][m | | ][mA][mA][mG][mG][m |
| | | A][idT] | | A][*mU][*mU] |
| M1 | 58 | [mC*][mC*][fU][mU][ | 191 | [fU*][fU*][mU][mC][ |
| | | mG][mC][fG][fG][fU] | | mG][mC][mU][mU][mU] |
| | | [mG][mA][fA][mA][mG | | [mC][mA][mC][mC][fG |
| | | ][mC][mG][fA][mA][m | | ][mC][mA][mA][mG][m |
| | | A][idT] | | G][*mU][*mU] |
| N1 | 59 | [mC*][mU*][fU][mG][ | 192 | [fU*][fA*][mU][mU][ |
| | | mC][mG][fG][fU][[G] | | mC][mG][mC][mU][mU] |
| | | [mA][mA][fA][mG][mC | | [mU][mC][mA][mC][fC |
| | | ][mG][mA][fA][mU][m | | ][mG][mC][mA][mA][m |
| | | A][idT] | | G][*mU][*mU] |
| O1 | 60 | [mU*][mU*][[G][mC][ | 193 | [fU*][fA*][mA][mU][ |
| | | mG][mG][fU][fG][[A] | | mU][mC][mG][mC][mU] |
| | | [mA][mA][fG][mC][mG | | [mU][mU][mC][mA][fC |
| | | ][mA][mA][fU][mU][m | | ][mC][mG][mC][mA][m |
| | | A][idT] | | A][*mU][*mU] |
| P1 | 61 | [mU*][mG*][fC][mG][ | 194 | [fU*][fG*][mA][mA][ |
| | | mG][mU][fG][fA][fA] | | mU][mU][mC][mG][mC] |
| | | [mA][mG][fC][mG][mA | | [mU][mU][mU][mC][fA |
| | | ][mA][mU][fU][mC][m | | ][mC][mC][mG][mC][m |
| | | A][idT] | | A][*mU][*mU] |
| Q1 | 62 | [mC*][mG*][fG][mU][ | 195 | [fU*][fA*][mG][mG][ |
| | | mG][mA][fA][[A][[G] | | mA][mA][mU][mU][mC] |
| | | [mC][mG][fA][mA][mU | | [mG][mC][mU][mU][fU |
| | | ][mU][mC][fC][mU][m | | ][mC][mA][mC][mC][m |
| | | A][idT] | | G][*mU][*mU] |
| R1 | 63 | [mG*][mG*][fU][mG][ | 196 | [fU*][fU*][mA][mG][ |
| | | mA][mA][fA][fG][[C] | | mG][mA][mA][mU][mU] |
| | | [mG][mA][fA][mU][mU | | [mC][mG][mC][mU][fU |
| | | ][mC][mC][fU][mA][m | | ][mU][mC][mA][mC][m |
| | | A][idT] | | C][*mU][*mU] |
| S1 | 64 | [mU*][mG*][fA][mA][ | 197 | [fU*][fU*][mC][mU][ |
| | | mA][mG][fC][fG][fA] | | mA][mG][mG][mA][mA] |
| | | [mA][mU][fU][mC][mC | | [mU][mU][mC][mG][fC |
| | | ][mU][mA][fG][mA][m | | ][mU][mU][mU][mC][m |
| | | A][idT] | | A][*mU][*mU] |
| T1 | 65 | [mG*][mA*][fA][mA][ | 198 | [fU*][fG*][mU][mC][ |
| | | mG][mC][fG][fA][fA] | | mU][mA][mG][mG][mA] |
| | | [mU][mU][fC][mC][mU | | [mA][mU][mU][mC][fG |
| | | ][mA][mG][fA][mC][m | | ][mC][mU][mU][mU][m |
| | | A][idT] | | C][*mU][*mU] |
| U1 | 66 | [mA*][mA*][fA][mG][ | 199 | [fU*][fU*][mG][mU][ |
| | | mC][mG][fA][fA][fU] | | mC][mU][mA][mG][mG] |
| | | [mU][mC][fC][mU][mA | | [mA][mA][mU][mU][fC |
| | | ][mG][mA][fC][mA][m | | ][mG][mC][mU][mU][m |
| | | A][idT] | | U][*mU][*mU] |
| V1 | 67 | [mA*][mA*][fG][mC][ | 200 | [fU*][fG*][mU][mG][ |
| | | mG][mA][fA][fU][fU] | | mU][mC][mU][mA][mG] |
| | | [mC][mC][fU][mA][mG | | [mG][mA][mA][mU][fU |
| | | ][mA][mC][fA][mC][m | | ][mC][mG][mC][mU][m |
| | | A][idT] | | U][*mU][*mU] |
| W1 | 68 | [mA*][mG*][fC][mG][ | 201 | [fU*][fG*][mG][mu][ |
| | | mA][mA][fU][fU][fC] | | mG][mU][mC][mU][mA] |
| | | [mC][mU][fA][mG][mA | | [mG][mG][mA][mA][fU |
| | | ][mC][mA][fC][mC][m | | ][mU][mC][mG][mC][m |
| | | A][idT] | | U][*mU][*mU] |
| X1 | 69 | [mC*][mU*][[A][mG][ | 202 | [fU*][fU*][mC][mU][ |
| | | mA][mC][fA][fC][fC] | | mG][mU][mU][mC][mC] |
| | | [mU][mG][fG][mA][mA | | [mA][mG][mG][mU][fG |
| | | ][mC][mA][fG][mA][m | | ][mU][mC][mU][mA][m |
| | | A][idT] | | G][*mU][*mU] |
| Y1 | 70 | [mC*][mA*][fG][mC][ | 203 | [fU*][fG*][mU][mC][ |
| | | mA][mC][fA][fA][fA] | | mG][mC][mA][mG][mU] |
| | | [mU][mA][fC][mU][mG | | [mA][mU][mU][mU][fG |
| | | ][mC][mG][fA][mC][m | | ][mU][mG][mC][mU][m |
| | | A][idT] | | G][*mU][*mU] |
| Z1 | 71 | [mA*][mG*][fC][mA][ | 204 | [fU*][fG*][mG][mU][ |
| | | mC][mA][fA][fA][fu] | | mC][mG][mC][mA][mG] |
| | | [mA][mC][fU][mG][mC | | [mU][mA][mU][mU][fU |
| | | ][mG][mA][fC][mC][m | | ][mG][mU][mG][mC][m |
| | | A][idT] | | U][*mU][*mU] |
| A2 | 72 | [mG*][mC*][fA][mC][ | 205 | [fU*][fG*][mG][mG][ |
| | | mA][mA][fA][fU][fA] | | mU][mC][mG][mC][mA] |
| | | [mC][mU][fG][mC][mG | | [mG][mU][mA][mU][fU |
| | | ][mA][mC][fC][mC][m | | ][mU][mG][mU][mG][m |
| | | A][idT] | | C][*mU][*mU] |
| B2 | 73 | [mU*][mA*][fC][mU][ | 206 | [fU*][fU*][mA][mG][ |
| | | mG][mC][fG][fA][fC] | | mG][mU][mU][mG][mG] |
| | | [mC][mC][fC][mA][mA | | [mG][mG][mU][mC][fG |
| | | ][mC][mC][fU][mA][m | | ][mC][mA][mG][mU][m |
| | | A][idT] | | A][*mU][*mU] |
| C2 | 74 | [mA*][mC*][fU][mG][ | 207 | [fU*][fC*][mU][mA][ |
| | | mC][mG][fA][fC][fC] | | mG][mG][mU][mU][mG] |
| | | [mC][mC][fA][mA][mC | | [mG][mG][mG][mU][fC |
| | | ][mC][mU][fA][mG][m | | ][mG][mC][mA][mG][m |
| | | A][idT] | | U][*mU][*mU] |
| D2 | 75 | [mC*][mU*][fG][mC][ | 208 | [fU*][fC*][mC][mU][ |
| | | mG][mA][fC][fC][fC] | | mA][mG][mG][mU][mU] |
| | | [mC][mA][fA][mC][mC | | [mG][mG][mG][mG][fU |
| | | ][mU][mA][fG][mG][m | | ][mC][mG][mC][mA][m |
| | | A][idT] | | G][*mU][*mU] |
| E2 | 76 | [mG*][mA*][fC][mC][ | 209 | [fU*][fA*][mA][mG][ |
| | | mC][mC][fA][fA][fC] | | mC][mC][mC][mU][mA] |
| | | [mC][mU][fA][mG][mG | | [mG][mG][mU][mU][fG |
| | | ][mG][mC][fU][mU][m | | ][mG][mG][mG][mU][m |
| | | A][idT] | | C][*mU][*mU] |
| F2 | 77 | [mA*][mC*][fC][mC][ | 210 | [fU*][fG*][mA][mA][ |
| | | mC][mA][fA][fC][fC] | | mG][mC][mC][mC][mU] |
| | | [mU][mA][fG][mG][mG | | [mA][mG][mG][mU][fU |
| | | ][mC][mU][fU][mC][m | | ][mG][mG][mG][mG][m |
| | | A][idT] | | U][*mU][*mU] |
| G2 | 78 | [mC*][mC*][fC][mC][ | 211 | [fU*][fC*][mG][mA][ |
| | | mA][mA][fC][fC][fU] | | mA][mG][mC][mC][mC] |
| | | [mA][mG][fG][mG][mC | | [mU][mA][mG][mG][fU |
| | | ][mU][mU][fC][mG][m | | ][mU][mG][mG][mG][m |
| | | A][idT] | | G][*mU][*mU] |
| H2 | 79 | [mC*][mC*][fU][mA][ | 212 | [fU*][fU*][mG][mG][ |
| | | mG][mG][fG][fC][fU] | | mA][mC][mC][mC][mG] |
| | | [mU][mC][fG][mG][mG | | [mA][mA][mG][mC][fC |
| | | ][mU][mC][fC][mA][m | | ][mC][mU][mA][mG][m |
| | | A][idT] | | G][*mU][*mU] |
| I2 | 80 | [mU*][mC*][fG][mG][ | 213 | [fU*][fC*][mC][mC][ |
| | | mG][mU][fC][fC][fA] | | mU][mU][mC][mU][mG] |
| | | [mG][mC][fA][mG][mA | | [mC][mU][mG][mG][fA |
| | | ][mA][mG][fG][mG][m | | ][mC][mC][mC][mG][m |
| | | A][idT] | | A][*mU][*mU] |
| J2 | 81 | [mG*][mA*][fA][mG][ | 214 | [fU*][fC*][mG][mU][ |
| | | mG][mC][fU][fG][fG] | | mA][mC][mA][mG][mU] |
| | | [mC][mA][fC][mU][mG | | [mG][mC][mC][mA][fG |
| | | ][mU][mA][fC][mG][m | | ][mC][mC][mU][mU][m |
| | | A][idT] | | C][*mU][*mU] |
| K2 | 82 | [mG*][mG*][fC][mA][ | 215 | [fU*][fC*][mC][mU][ |
| | | mC][mU][fG][fU][fA] | | mC][mA][mC][mU][mC] |
| | | [mC][mG][fA][mG][mU | | [mG][mU][mA][mC][fA |
| | | ][mG][mA][fG][mG][m | | ][mG][mU][mG][mC][m |
| | | A][idT] | | C][*mU][*mU] |
| L2 | 83 | [mG*][mU*][[A][mC][ | 216 | [fU*][fC*][mA][mC][ |
| | | mG][mA][fG][fU][fG] | | mA][mG][mG][mC][mC] |
| | | [mA][mG][fG][mC][mC | | [mU][mC][mA][mC][fU |
| | | ][mU][mG][fU][mG][m | | ][mC][mG][mU][mA][m |
| | | A][idT] | | C][*mU][*mU] |
| M2 | 84 | [mU*][mG*][fU][mC][ | 217 | [fU*][fC*][mA][mU][ |
| | | mC][mU][fG][fC][[A] | | mG][mA][mG][mC][mG] |
| | | [mC][mC][fG][mC][mU | | [mG][mU][mG][mC][fA |
| | | ][mC][mA][fU][mG][m | | ][mG][mG][mA][mC][m |
| | | A][idT] | | A][*mU][*mU] |
| N2 | 85 | [mU*][mG*][fC][mA][ | 218 | [fU*][fG*][mC][mG][ |
| | | mC][mC][fG][fC][fU] | | mA][mG][mC][mA][mU] |
| | | [mC][mA][fU][mG][mC | | [mG][mA][mG][mC][fG |
| | | ][mU][mC][fG][mC][m | | ][mG][mU][mG][mC][m |
| | | A][idT] | | A][*mU][*mU] |
| O2 | 86 | [mG*][mC*][fA][mC][ | 219 | [fU*][fG*][mG][mC][ |
| | | mC][mG][fC][fU][fC] | | mG][mA][mG][mC][mA] |
| | | [mA][mU][fG][mC][mU | | [mU][mG][mA][mG][fC |
| | | ][mC][mG][fC][mC][m | | ][mG][mG][mU][mG][m |
| | | A][idT] | | C][*mU][*mU] |
| P2 | 87 | [mC*][mC*][fG][mC][ | 220 | [fU*][fC*][mC][mG][ |
| | | mU][mC][fA][fU][fG] | | mG][mG][mC][mG][mA] |
| | | [mC][mU][fC][mG][mC | | [mG][mC][mA][mU][fG |
| | | ][mC][mC][fG][mG][m | | ][mA][mG][mC][mG][m |
| | | A][idT] | | G][*mU][*mU] |
| Q2 | 88 | [mC*][mC*][fC][mG][ | 221 | [fU*][fC*][mU][mU][ |
| | | mG][mC][fU][fU][fU] | | mG][mA][mC][mC][mC] |
| | | [mG][mG][fG][mG][mU | | [mC][mA][mA][mA][EG |
| | | ][mC][mA][fA][mG][m | | ][mC][mC][mG][mG][m |
| | | A][idT] | | G][*mU][*mU] |
| R2 | 89 | [mC*][mU*][fG][mA][ | 222 | [fU*][fG*][mC][mU][ |
| | | mU][mA][fC][fC][[A] | | mC][mG][mC][mA][mG] |
| | | [mU][mC][fU][mG][mC | | [mA][mU][mG][mG][fU |
| | | ][mG][mA][fG][mC][m | | ][mA][mU][mC][mA][m |
| | | A][idT] | | G][*mU][*mU] |
| S2 | 90 | [mU*][mG*][fA][mU][ | 223 | [fU*][fG*][mG][mC][ |
| | | mA][mC][fC][fA][fU] | | mU][mC][mG][mC][mA] |
| | | [mC][mU][fG][mC][mG | | [mG][mA][mU][mG][fG |
| | | ][mA][mG][fC][mC][m | | ][mU][mA][mU][mC][m |
| | | A][idT] | | A][*mU][*mU] |
| T2 | 91 | [mC*][mU*][fG][mC][ | 224 | [fU*][fA*][mA][mG][ |
| | | mC][mC][fA][fG][fU] | | mA][mA][mG][mC][mC] |
| | | [mC][mG][fG][mC][mU | | [mG][mA][mC][mU][fG |
| | | ][mU][mC][fU][mU][m | | ][mG][mG][mC][mA][m |
| | | A][idT] | | G][*mU][*mU] |
| U2 | 92 | [mG*][mU*][fG][mU][ | 225 | [fU*][fU*][mU][mC][ |
| | | mC][mA][fU][fC][fU] | | mG][mA][mA][mA][mG] |
| | | [mG][mC][fU][mU][mU | | [mC][mA][mG][mA][fU |
| | | ][mC][mG][fA][mA][m | | ][mG][mA][mC][mA][m |
| | | A][idT] | | C][*mU][*mU] |
| V2 | 93 | [mU*][mG*][fU][mC][ | 226 | [fU*][fU*][mU][mU][ |
| | | mA][mU][fC][fU][fG] | | mC][mG][mA][mA][mA] |
| | | [mC][mU][fU][mU][mC | | [mG][mC][mA][mG][fA |
| | | ][mG][mA][fA][mA][m | | ][mU][mG][mA][mC][m |
| | | A][idT] | | A][*mU][*mU] |
| W2 | 94 | [mU*][mC*][fA][mU][ | 227 | [fU*][fU*][mU][mU][ |
| | | mC][mU][fG][fC][fU] | | mU][mU][mC][mG][mA] |
| | | [mU][mU][fC][mG][mA | | [mA][mA][mG][mC][fA |
| | | ][mA][mA][fA][mA][m | | ][mG][mA][mU][mG][m |
| | | A][idT] | | A][*mU][*mU] |
| X2 | 95 | [mU*][mU*][fC][mG][ | 228 | [fU*][fA*][mG][mG][ |
| | | mA][mA][fA][fA][fA] | | mG][mU][mG][mA][mC] |
| | | [mU][mG][fU][mC][mA | | [mA][mU][mU][mU][fU |
| | | ][mC][mC][fC][mU][m | | ][mU][mC][mG][mA][m |
| | | A][idT] | | A][*mU][*mU] |
| Y2 | 96 | [mU*][mC*][fG][mA][ | 229 | [fU*][fA*][mA][mG][ |
| | | mA][mA][fA][fA][fU] | | mG][mG][mU][mG][mA] |
| | | [mG][mU][fC][mA][mC | | [mC][mA][mU][mU][fU |
| | | ][mC][mC][fU][mu][m | | ][mU][mU][mC][mG][m |
| | | A][idT] | | A][*mU][*mU] |
| Z2 | 97 | [mA*][mA*][fA][mA][ | 230 | [fU*][fG*][mU][mC][ |
| | | mU][mG][fU][fC][fA] | | mC][mA][mA][mG][mG] |
| | | [mC][mC][fC][mU][mU | | [mG][mU][mG][mA][fC |
| | | ][mG][mG][fA][mC][m | | ][mA][mU][mU][mU][m |
| | | A][idT] | | U][*mU][*mU] |
| A3 | 98 | [mU*][mG*][fA][mU][ | 231 | [fU*][fC*][mG][mA][ |
| | | mC][mC][fC][fC][fA] | | mA][mG][mA][mU][mG] |
| | | [mU][mC][fA][mU][mC | | [mA][mU][mG][mG][fG |
| | | ][mU][mU][fC][mG][m | | ][mG][mA][mU][mC][m |
| | | A][idT] | | A][*mU][*mU] |
| B3 | 99 | [mC*][mC*][fC][mC][ | 232 | [fU*][fA*][mU][mC][ |
| | | mA][mU][fC][fA][fU] | | mC][mC][mG][mA][mA] |
| | | [mC][mU][fU][mC][mG | | [mG][mA][mU][mG][fA |
| | | ][mG][mG][fA][mU][m | | ][mU][mG][mG][mG][m |
| | | A][idT] | | G][*mU][*mU] |
| C3 | 100 | [mA*][mU*][fC][mU][ | 233 | [fU*][fA*][mA][mA][ |
| | | mU][mC][fG][fG][fG] | | mC][mA][mG][mG][mA] |
| | | [mA][mU][fC][mC][mU | | [mU][mC][mC][mC][fG |
| | | ][mG][mU][fU][mU][m | | ][mA][mA][mG][mA][m |
| | | A][idT] | | U][*mU][*mU] |
| D3 | 101 | [mA*][mA*][fG][mA][ | 234 | [fU*][fC*][mU][mU][ |
| | | mA][mG][fC][fC][fA] | | mA][mU][mU][mG][mG] |
| | | [mA][mC][fC][mA][mA | | [mU][mU][mG][mG][fC |
| | | ][mU][mA][fA][mG][m | | ][mU][mU][mC][mU][m |
| | | A][idT] | | U][*mU][*mU] |
| E3 | 102 | [mA*][mA*][fG][mC][ | 235 | [fU*][fG*][mG][mC][ |
| | | mC][mA][fA][fC][fC] | | mC][mU][mU][mA][mU] |
| | | [mA][mA][fU][mA][mA | | [mU][mG][mG][mU][fU |
| | | ][mG][mG][fC][mC][m | | ][mG][mG][mC][mU][m |
| | | A][idT] | | U][*mU][*mU] |
| F3 | 103 | [mA*][mG*][fA][mU][ | 236 | [fU*][fC*][mG][mU][ |
| | | mC][mA][fA][fU][fU] | | mC][mG][mG][mG][mA] |
| | | [mU][mU][fC][mC][mC | | [mA][mA][mA][mU][fU |
| | | ][mG][mA][fC][mG][m | | ][mG][mA][mU][mC][m |
| | | A][idT] | | U][*mU][*mU] |
| G3 | 104 | [mG*][mA*][fU][mC][ | 237 | [fU*][fU*][mC][mG][ |
| | | mA][mA][fU][fU][fU] | | mU][mC][mG][mG][mG] |
| | | [mU][mC][fC][mC][mG | | [mA][mA][mA][mA][fU |
| | | ][mA][mC][fG][mA][m | | ][mU][mG][mA][mU][m |
| | | A][idT] | | C][*mU][*mU] |
| H3 | 105 | [mA*][mU*][fC][mA][ | 238 | [fU*][fA*][mU][mC][ |
| | | mA][mU][fU][fU][fU] | | mG][mU][mC][mG][mG] |
| | | [mC][mC][fC][mG][mA | | [mG][mA][mA][mA][fA |
| | | ][mC][mG][fA][mu][m | | ][mU][mU][mG][mA][m |
| | | A][idT] | | U][*mU][*mU] |
| I3 | 106 | [mU*][mC*][fA][mA][ | 239 | [fU*][fG*][mA][mU][ |
| | | mU][mU][fU][fU][fC] | | mC][mG][mU][mC][mG] |
| | | [mC][mC][fG][mA][mC | | [mG][mG][mA][mA][fA |
| | | ][mG][mA][fU][mC][m | | ][mA][mU][mU][mG][m |
| | | A][idT] | | A][*mU][*mU] |
| J3 | 107 | [mC*][mG*][fA][mC][ | 240 | [fU*][fG*][mA][mG][ |
| | | mG][mA][fU][fC][fU] | | mC][mC][mA][mG][mG] |
| | | [mU][mC][fC][mU][mG | | [mA][mA][mG][mA][fU |
| | | ][mG][mC][fU][mC][m | | ][mC][mG][mU][mC][m |
| | | A][idT] | | G][*mU][*mU] |
| K3 | 108 | [mA*][mC*][fG][mA][ | 241 | [fU*][fU*][mG][mG][ |
| | | mU][mC][fU][fU][fC] | | mA][mG][mC][mC][mA] |
| | | [mC][mU][fG][mG][mC | | [mG][mG][mA][mA][fG |
| | | ][mU][mC][fC][mA][m | | ][mA][mU][mC][mG][m |
| | | A][idT] | | U][*mU][*mU] |
| L3 | 109 | [mG*][mA*][fU][mC][ | 242 | [fU*][fG*][mU][mU][ |
| | | mU][mU][fC][fC][fU] | | mG][mG][mA][mG][mC] |
| | | [mG][mG][fC][mU][mC | | [mC][mA][mG][mG][fA |
| | | ][mC][mA][fA][mC][m | | ][mA][mG][mA][mU][m |
| | | A][idT] | | C][*mU][*mU] |
| M3 | 110 | [mU*][mG*][fC][mA][ | 243 | [fU*][fC*][mA][mu][ |
| | | mG][mG][fA][fG][fA] | | mG][mU][mA][mA][mA] |
| | | [mC][mU][fU][mU][mA | | [mG][mU][mC][mU][fC |
| | | ][mC][mA][fU][mG][m | | ][mC][mU][mG][mC][m |
| | | A][idT] | | A][*mU][*mU] |
| N3 | 111 | [mC*][mA*][fG][mG][ | 244 | [fU*][fU*][mC][mC][ |
| | | mA][mG][fA][fC][fU] | | mA][mU][mG][mU][mA] |
| | | [mU][mU][fA][mC][mA | | [mA][mA][mG][mU][fC |
| | | ][mU][mG][fG][mA][m | | ][mU][mC][mC][mU][m |
| | | A][idT] | | G][*mU][*mU] |
| O3 | 112 | [mG*][mG*][fA][mG][ | 245 | [fU*][fC*][mA][mU][ |
| | | mA][mC][fU][fU][fu] | | mC][mC][mA][mU][mG] |
| | | [mA][mC][fA][mU][mG | | [mU][mA][mA][mA][fG |
| | | ][mG][mA][fU][mG][m | | ][mU][mC][mU][mC][m |
| | | A][idT] | | C][*mU][*mU] |
| P3 | 113 | [mA*][mG*][fG][mA][ | 246 | [fU*][fG*][mA][mC][ |
| | | mU][mG][fG][fC][fA] | | mU][mC][mU][mC][mU] |
| | | [mA][mA][fG][mA][mG | | [mU][mU][mG][mC][fC |
| | | ][mA][mG][fU][mC][m | | ][mA][mU][mC][mC][m |
| | | A][idT] | | U][*mU][*mU] |
| Q3 | 114 | [mG*][mG*][fA][mU][ | 247 | [fU*][fC*][mG][mA][ |
| | | mG][mG][fC][fA][fA] | | mC][mU][mC][mU][mC] |
| | | [mA][mG][fA][mG][mA | | [mU][mU][mU][mG][fC |
| | | ][mG][mU][fC][mG][m | | ][mC][mA][mU][mC][m |
| | | A][idT] | | C][*mU][*mU] |
| R3 | 115 | [mU*][mG*][fG][mC][ | 248 | [fU*][fA*][mU][mG][ |
| | | mA][mA][fA][fG][fA] | | mC][mG][mA][mC][mU] |
| | | [mG][mA][fG][mU][mC | | [mC][mU][mC][mU][fU |
| | | ][mG][mC][fA][mU][m | | ][mU][mG][mC][mC][m |
| | | A][idT] | | A][*mU][*mU] |
| S3 | 116 | [mG*][mG*][fC][mA][ | 249 | [fU*][fG*][mA][mu][ |
| | | mA][mA][fG][fA][fG] | | mG][mC][mG][mA][mC] |
| | | [mA][mG][fU][mC][mG | | [mU][mC][mU][mC][fU |
| | | ][mC][mA][fU][mC][m | | ][mU][mU][mG][mC][m |
| | | A][idT] | | C][*mU][*mU] |
| T3 | 117 | [mG*][mC*][fA][mA][ | 250 | [fU*][fA*][mG][mA][ |
| | | mA][mG][fA][fG][fA] | | mU][mG][mC][mG][mA] |
| | | [mG][mU][fC][mG][mC | | [mC][mU][mC][mU][fC |
| | | ][mA][mU][fC][mU][m | | ][mU][mU][mU][mG][m |
| | | A][idT] | | C][*mU][*mU] |
| U3 | 118 | [mA*][mA*][fA][mG][ | 251 | [fU*][fU*][mG][mA][ |
| | | mA][mG][fA][fG][fU] | | mG][mA][mU][mG][mC] |
| | | [mC][mG][fC][mA][mU | | [mG][mA][mC][mU][fC |
| | | ][mC][mU][fC][mA][m | | ][mU][mC][mU][mU][m |
| | | A][idT] | | U][*mU][*mU] |
| V3 | 119 | [mA*][mA*][fG][mA][ | 252 | [fU*][fC*][mU][mG][ |
| | | mG][mA][fG][fU][fC] | | mA][mG][mA][mU][mG] |
| | | [mG][mC][fA][mU][mC | | [mC][mG][mA][mC][fU |
| | | ][mU][mC][fA][mG][m | | ][mC][mU][mC][mU][m |
| | | A][idT] | | U][*mU][*mU] |
| W3 | 120 | [mA*][mG*][fA][mG][ | 253 | [fU*][fA*][mC][mU][ |
| | | mA][mG][fU][fC][fG] | | mG][mA][mG][mA][mU] |
| | | [mC][mA][fU][mC][mU | | [mG][mC][mG][mA][fC |
| | | ][mC][mA][fG][mU][m | | ][mU][mC][mU][mC][m |
| | | A][idT] | | U][*mU][*mU] |
| X3 | 121 | [mG*][mA*][fG][mA][ | 254 | [fU*][fC*][mA][mC][ |
| | | mG][mU][fC][fG][fC] | | mU][mG][mA][mG][mA] |
| | | [mA][mU][fC][mU][mC | | [mU][mG][mC][mG][fA |
| | | ][mA][mG][fU][mG][m | | ][mC][mU][mC][mU][m |
| | | A][idT] | | C][*mU][*mU] |
| Y3 | 122 | [mA*][mG*][fA][mG][ | 255 | [fU*][fG*][mC][mA][ |
| | | mU][mC][fG][fC][fA] | | mC][mU][mG][mA][mG] |
| | | [mU][mC][fU][mC][mA | | [mA][mU][mG][mC][fG |
| | | ][mG][mU][fG][mC][m | | ][mA][mC][mU][mC][m |
| | | A][idT] | | U][*mU][*mU] |
| Z3 | 123 | [mG*][mA*][fG][mU][ | 256 | [fU*][fU*][mG][mC][ |
| | | mC][mG][fC][fA][fU] | | mA][mC][mU][mG][mA] |
| | | [mC][mU][fC][mA][mG | | [mG][mA][mU][mG][fC |
| | | ][mU][mG][fC][mA][m | | ][mG][mA][mC][mU][m |
| | | A][idT] | | C][*mU][*mU] |
| A4 | 124 | [mG*][mU*][fC][mG][ | 257 | [fU*][fC*][mC][mU][ |
| | | mC][mA][fU][fC][fU] | | mG][mC][mA][mC][mU] |
| | | [mC][mA][fG][mU][mG | | [mG][mA][mG][mA][fU |
| | | ][mC][mA][fG][mG][m | | ][mG][mC][mG][mA][m |
| | | A][idT] | | C][*mU][*mU] |
| B4 | 125 | [mC*][mU*][fG][mC][ | 258 | [fU*][fA*][mC][mC][ |
| | | mU][mG][fU][fG][fG] | | mC][mU][mC][mA][mC] |
| | | [mC][mG][fU][mG][mA | | [mG][mC][mC][mA][fC |
| | | ][mG][mG][fG][mU][m | | ][mA][mG][mC][mA][m |
| | | A][idT] | | G][*mU][*mU] |
| C4 | 126 | [mG*][mG*][fC][mA][ | 259 | [fU*][fC*][mU][mA][ |
| | | mC][mU][fG][fA][fC] | | mU][mG][mC][mC][mC] |
| | | [mU][mG][fG][mG][mC | | [mA][mG][mU][mC][fA |
| | | ][mA][mU][fA][mG][m | | ][mG][mU][mG][mC][m |
| | | A][idT] | | C][*mU][*mU] |
| D4 | 127 | [mG*][mG*][fG][mC][ | 260 | [fU*][fA*][mA][mG][ |
| | | mA][mU][fA][fG][fC] | | mC][mG][mG][mG][mG] |
| | | [mU][mC][fC][mC][mC | | [mA][mG][mC][mU][fA |
| | | ][mG][mC][fU][mU][m | | ][mU][mG][mC][mC][m |
| | | A][idT] | | C][*mU][*mU] |
| E4 | 128 | [mA*][mG*][fA][mA][ | 261 | [fU*][fG*][mG][mU][ |
| | | mC][mC][fU][fC][fU] | | mG][mA][mA][mG][mU] |
| | | [mC][mA][fC][mU][mU | | [mG][mA][mG][mA][fG |
| | | ][mC][mA][fC][mC][m | | ][mG][mU][mU][mC][m |
| | | A][idT] | | U][*mU][*mU] |
| F4 | 129 | [mG*][mA*][fA][mC][ | 262 | [fU*][fG*][mG][mG][ |
| | | mC][mU][fC][fU][fC] | | mU][mG][mA][mA][mG] |
| | | [mA][mC][fU][mU][mC | | [mU][mG][mA][mG][fA |
| | | ][mA][mC][fC][mC][m | | ][mG][mG][mU][mU][m |
| | | A][idT] | | C][*mU][*mU] |
| G4 | 130 | [mA*][mG*][fU][mC][ | 263 | [fU*][fA*][mA][mU][ |
| | | mU][mC][fC][fC][fA] | | mA][mC][mA][mA][mG] |
| | | [mA][mC][fU][mU][mG | | [mU][mU][mG][mG][fG |
| | | ][mU][mA][fU][mU][m | | ][mA][mG][mA][mC][m |
| | | A][idT] | | U][*mU][*mU] |
| H4 | 131 | [mG*][mG*][fU][mU][ | 264 | [fU*][fG*][mG][mu][ |
| | | mU][mA][fG][fU][[A] | | mG][mG][mA][mU][mA] |
| | | [mA][mU][fA][mU][mC | | [mU][mU][mA][mC][fU |
| | | ][mC][mA][fC][mC][m | | ][mA][mA][mA][mC][m |
| | | A][idT] | | C][*mU][*mU] |
| I4 | 132 | [mG*][mU*][fU][mU][ | 265 | [fU*][fU*][mG][mG][ |
| | | mA][mG][fU][fA][fA] | | mU][mG][mG][mA][mU] |
| | | [mU][mA][fU][mC][mC | | [mA][mU][mU][mA][fC |
| | | ][mA][mC][fC][mA][m | | ][mU][mA][mA][mA][m |
| | | A][idT] | | C][*mU][*mU] |
| J4 | 133 | [mU*][mU*][fU][mA][ | 266 | [fU*][fC*][mU][mG][ |
| | | mG][mU][fA][fA][fU] | | mG][mU][mG][mG][mA] |
| | | [mA][mU][fC][mC][mA | | [mU][mA][mU][mU][fA |
| | | ][mC][mC][fA][mG][m | | ][mC][mU][mA][mA][m |
| | | A][idT] | | A][*mU][*mU] |
| K4 | 134 | [mG*][mU*][fA][mA][ | 267 | [fU*][fA*][mG][mG][ |
| | | mU][mA][fU][fC][fC] | | mU][mC][mU][mG][mG] |
| | | [mA][mC][fC][mA][mG | | [mU][mG][mG][mA][fU |
| | | ][mA][mC][fC][mU][m | | ][mA][mU][mU][mA][m |
| | | A][idT] | | C][*mU][*mU] |
| L4 | 135 | [mU*][mA*][fA][mU][ | 268 | [fU*][fA*][mA][mG][ |
| | | mA][mU][fC][fC][fA] | | mG][mU][mC][mU][mG] |
| | | [mC][mC][fA][mG][mA | | [mG][mU][mG][mG][fA |
| | | ][mC][mC][fU][mU][m | | ][mU][mA][mU][mU][m |
| | | A][idT] | | A][*mU][*mU] |
| M4 | 136 | [mC*][mA*][fU][mG][ | 269 | [fU*][fC*][mG][mC][ |
| | | mG][mU][fG][fG][fC] | | mA][mG][mG][mG][mA] |
| | | [mU][mU][fC][mC][mC | | [mA][mG][mC][mC][fA |
| | | ][mU][mG][fC][mG][m | | ][mC][mC][mA][mU][m |
| | | A][idT] | | G][*mU][*mU] |
| N4 | 137 | [mU*][mG*][fC][mG][ | 270 | [fU*][fU*][mA][mU][ |
| | | mC][mC][fC][fA][fG] | | mG][mG][mC][mU][mU] |
| | | [mG][mA][fA][mG][mC | | [mC][mC][mU][mG][fG |
| | | ][mC][mA][fU][mA][m | | ][mG][mC][mG][mC][m |
| | | A][idT] | | A][*mU][*mU] |
| O4 | 138 | [mC*][mG*][fC][mC][ | 271 | [fU*][fU*][mA][mU][ |
| | | mC][mA][fG][fG][fA] | | mA][mU][mG][mG][mC] |
| | | [mA][mG][fC][mC][mA | | [mU][mU][mC][mC][fU |
| | | ][mU][mA][fU][mA][m | | ][mG][mG][mG][mC][m |
| | | A][idT] | | G][*mU][*mU] |
| P4 | 139 | [mA*][mG*][fC][mC][ | 272 | [fU*][fG*][mC][mA][ |
| | | mA][mU][fA][fU][fA] | | mU][mC][mU][mG][mU] |
| | | [mC][mA][fC][mA][mG | | [mG][mU][mA][mU][fA |
| | | ][mA][mU][fG][mC][m | | ][mU][mG][mG][mC][m |
| | | A][idT] | | U][*mU][*mU] |
| Q4 | 140 | [mG*][mC*][fC][mA][ | 273 | [fU*][fG*][mG][mC][ |
| | | mU][mA][fU][fA][fC] | | mA][mU][mC][mU][mG] |
| | | [mA][mC][fA][mG][mA | | [mU][mG][mU][mA][fU |
| | | ][mU][mG][fC][mC][m | | ][mA][mU][mG][mG][m |
| | | A][idT] | | C][*mU][*mU] |
| R4 | 141 | [mU*][mU*][fG][mU][ | 274 | [fU*][fG*][mU][mU][ |
| | | mU][mU][fG][fU][fG] | | mC][mA][mC][mU][mA] |
| | | [mA][mU][fA][mG][mU | | [mU][mC][mA][mC][fA |
| | | ][mG][mA][fA][mC][m | | ][mA][mA][mC][mA][m |
| | | A][idT] | | A][*mU][*mU] |
| S4 | 142 | [mG*][mG*][fA][mA][ | 275 | [fU*][fG*][mA][mC][ |
| | | mG][mC][fU][fG][fC] | | mA][mG][mU][mU][mA] |
| | | [mU][mU][fA][mA][mc | | [mA][mG][mC][mA][fG |
| | | ][mU][mG][fU][mC][m | | ][mC][mU][mU][mC][m |
| | | A][idT] | | C][*mU][*mU] |
| T4 | 143 | [mG*][mC*][fU][mG][ | 276 | [fU*][fG*][mA][mu][ |
| | | mC][mU][fU][fA][[A] | | mG][mG][mA][mC][mA] |
| | | [mC][mU][fG][mU][mC | | [mG][mU][mU][mA][fA |
| | | ][mC][mA][fU][mC][m | | ][mG][mC][mA][mG][m |
| | | A][idT] | | C][*mU][*mU] |
| U4 | 144 | [mA*][mG*][fC][mA][ | 277 | [fU*][fU*][mU][mu][ |
| | | mG][mG][fA][fG][fA] | | mA][mG][mC][mC][mA] |
| | | [mC][mU][fG][mG][mC | | [mG][mU][mC][mU][fC |
| | | ][mU][mA][fA][mA][m | | ][mC][mU][mG][mC][m |
| | | A][idT] | | U][*mU][*mU] |
| V4 | 145 | [mG*][mC*][fA][mG][ | 278 | [fU*][fA*][mU][mU][ |
| | | mG][mA][fG][fA][fC] | | mU][mA][mG][mC][mC] |
| | | [mU][mG][fG][mC][mU | | [mA][mG][mU][mC][fU |
| | | ][mA][mA][fA][mu][m | | ][mC][mC][mU][mG][m |
| | | A][idT] | | C][*mU][*mU] |
| W4 | 146 | [mC*][mA*][fG][mG][ | 279 | [fU*][fU*][mA][mu][ |
| | | mA][mG][fA][fC][fU] | | mU][mU][mA][mG][mC] |
| | | [mG][mG][fC][mU][mA | | [mC][mA][mG][mU][fC |
| | | ][mA][mA][fU][mA][m | | ][mU][mC][mC][mU][m |
| | | A][idT] | | G][*mU][*mU] |
| X4 | 147 | [mA*][mU*][fA][mC][ | 280 | [fU*][fU*][mU][mU][ |
| | | mA][mA][fC][fA][fG] | | mG][mA][mG][mA][mU] |
| | | [mA][mA][fU][mC][mU | | [mU][mC][mU][mG][fU |
| | | ][mC][mA][fA][mA][m | | ][mU][mG][mU][mA][m |
| | | A][idT] | | U][*mU][*mU] |
| Y4 | 148 | [mC*][mA*][fG][mA][ | 281 | [fU*][fC*][mG][mA][ |
| | | mA][mA][fA][fC][fC] | | mG][mC][mU][mG][mU] |
| | | [mC][mA][fC][mA][mG | | [mG][mG][mG][mU][fU |
| | | ][mC][mU][fC][mG][m | | ][mU][mU][mC][mU][m |
| | | A][idT] | | G][*mU][*mU] |
| Z4 | 149 | [mA*][mC*][fC][mC][ | 282 | [fU*][fA*][mC][mU][ |
| | | mA][mC][fA][fG][fC] | | mC][mU][mU][mC][mG] |
| | | [mU][mC][fG][mA][mA | | [mA][mG][mC][mU][fG |
| | | ][mG][mA][fG][mU][m | | ][mU][mG][mG][mG][m |
| | | A][idT] | | U][*mU][*mU] |
| A5 | 150 | [mG*][mC*][fU][mC][ | 283 | [fU*][fC*][mG][mU][ |
| | | mG][mA][fA][fG][fA] | | mC][mA][mC][mC][mA] |
| | | [mG][mU][fG][mG][mU | | [mC][mU][mC][mU][fU |
| | | ][mG][mA][fC][mG][m | | ][mC][mG][mA][mG][m |
| | | A][idT] | | C][*mU][*mU] |
| B5 | 151 | [mU*][mC*][fG][mA][ | 284 | [fU*][fG*][mA][mC][ |
| | | mA][mG][fA][fG][fU] | | mG][mU][mC][mA][mC] |
| | | [mG][mG][fU][mG][mA | | [mC][mA][mC][mU][fC |
| | | ][mC][mG][fU][mC][m | | ][mU][mU][mC][mG][m |
| | | A][idT] | | A][*mU][*mU] |
| C5 | 152 | [mG*][mA*][fA][mG][ | 285 | [fU*][fC*][mA][mG][ |
| | | mA][mG][fU][fG][fG] | | mA][mC][mG][mU][mC] |
| | | [mU][mG][fA][mC][mG | | [mA][mC][mC][mA][fC |
| | | ][mU][mC][fU][mG][m | | ][mU][mC][mU][mU][m |
| | | A][idT] | | C][*mU][*mU] |
| D5 | 153 | [mG*][mG*][fU][mU][ | 286 | [fU*][fA*][mU][mC][ |
| | | mG][mG][fU][fU][fA] | | mU][mC][mC][mC][mU] |
| | | [mA][mA][fG][mG][mG | | [mU][mU][mA][mA][fC |
| | | ][mA][mG][fA][mu][m | | ][mC][mA][mA][mC][m |
| | | A][idT] | | C][*mU][*mU] |
| E5 | 154 | [mU*][mU*][fG][mG][ | 287 | [fU*][fG*][mC][mA][ |
| | | mC][mU][fU][fU][fC] | | mU][mU][mA][mU][mG] |
| | | [mC][mC][fA][mU][mA | | [mG][mG][mA][mA][fA |
| | | ][mA][mU][fG][mC][m | | ][mG][mC][mC][mA][m |
| | | A][idT] | | A][*mU][*mU] |
| F5 | 155 | [mC*][mC*][fC][mU][ | 288 | [fU*][fG*][mA][mA][ |
| | | mG][mC][fC][fC][fA] | | mG][mC][mC][mG][mA] |
| | | [mG][mU][fC][mG][mG | | [mC][mU][mG][mG][fG |
| | | ][mC][mU][fU][mC][m | | ][mC][mA][mG][mG][m |
| | | A][idT] | | G][*mU][*mU] |
| G5 | 156 | [mC*][mC*][fU][mG][ | 289 | [fU*][fA*][mG][mA][ |
| | | mC][mC][fC][fA][fG] | | mA][mG][mC][mC][mG] |
| | | [mU][mC][fG][mG][mC | | [mA][mC][mU][mG][fG |
| | | ][mU][mU][fC][mU][m | | ][mG][mC][mA][mG][m |
| | | A][idT] | | G][*mU][*mU] |
| H5 | 157 | [mU*][mG*][fC][mC][ | 290 | [fU*][fG*][mA][mA][ |
| | | mC][mA][fG][fU][fC] | | mG][mA][mA][mG][mC] |
| | | [mG][mG][fC][mU][mU | | [mC][mG][mA][mC][fU |
| | | ][mC][mU][fU][mC][m | | ][mG][mG][mG][mC][m |
| | | A][idT] | | A][*mU][*mU] |
| I5 | 158 | [mG*][mC*][fC][mC][ | 291 | [fU*][fA*][mG][mA][ |
| | | mA][mG][fU][fC][fG] | | mA][mG][mA][mA][mG] |
| | | [mG][mC][fU][mU][mC | | [mC][mC][mG][mA][fC |
| | | ][mU][mU][fC][mU][m | | ][mU][mG][mG][mG][m |
| | | A][idT] | | C][*mU][*mU] |
| J5 | 159 | [mC*][mC*][fA][mG][ | 292 | [fU*][fG*][mG][mA][ |
| | | mU][mC][fG][fG][fC] | | mG][mA][mA][mG][mA] |
| | | [mU][mU][fC][mU][mU | | [mA][mG][mC][mC][fG |
| | | ][mC][mU][fC][mC][m | | ][mA][mC][mU][mG][m |
| | | A][idT] | | G][*mU][*mU] |
| K5 | 160 | [mC*][mA*][fG][mU][ | 293 | [fU*][fU*][mG][mG][ |
| | | mC][mG][fG][fC][fU] | | mA][mG][mA][mA][mG] |
| | | [mU][mC][fU][mU][mC | | [mA][mA][mG][mC][fC |
| | | ][mU][mC][fC][mA][m | | ][mG][mA][mC][mU][m |
| | | A][idT] | | G][*mU][*mU] |
| L5 | 161 | [mA*][mG*][fU][mC][ | 294 | [fU*][fU*][mU][mG][ |
| | | mG][mG][fC][fU][fU] | | mG][mA][mG][mA][mA] |
| | | [mC][mU][fU][mC][mU | | [mG][mA][mA][mG][fC |
| | | ][mC][mC][fA][mA][m | | ][mC][mG][mA][mC][m |
| | | A][idT] | | U][*mU][*mU] |
| M5 | 162 | [mG*][mC*][fU][mG][ | 295 | [fU*][fC*][mU][mC][ |
| | | mC][mU][fC][fC][fA] | | mC][mU][mG][mC][mA] |
| | | [mG][mU][fG][mC][mA | | [mC][mU][mG][mG][fA |
| | | ][mG][mG][fA][mG][m | | ][mG][mC][mA][mG][m |
| | | A][idT] | | C][*mU][*mU] |
| N5 | 163 | [mC*][mU*][fG][mC][ | 296 | [fU*][fU*][mC][mU][ |
| | | mU][mC][fC][fA][fG] | | mC][mC][mU][mG][mC] |
| | | [mU][mG][fC][mA][mG | | [mA][mC][mU][mG][fG |
| | | ][mG][mA][fG][mA][m | | ][mA][mG][mC][mA][m |
| | | A][idT] | | G][*mU][*mU] |
| O5 | 164 | [mA*][mG*][fU][mC][ | 297 | [fU*][fC*][mU][mG][ |
| | | mG][mC][fA][fU][fC] | | mC][mA][mC][mU][mG] |
| | | [mU][mC][fA][mG][mU | | [mA][mG][mA][mU][fG |
| | | ][mG][mC][fA][mG][m | | ][mC][mG][mA][mC][m |
| | | A][idT] | | U][*mU][*mU] |
| P5 | 165 | [mU*][mC*][fG][mC][ | 298 | [fU*][fU*][mC][mC][ |
| | | mA][mU][fC][fU][fC] | | mU][mG][mC][mA][mC] |
| | | [mA][mG][fU][mG][mC | | [mU][mG][mA][mG][fA |
| | | ][mA][mG][fG][mA][m | | ][mU][mG][mC][mG][m |
| | | A][idT] | | A][*mU][*mU] |
| Q5 | 166 | [mC*][mC*][fC][mA][ | 299 | [fU*][fG*][mA][mG][ |
| | | mG][mU][fC][fG][fG] | | mA][mA][mG][mA][mA] |
| | | [mC][mU][fU][mC][mU | | [mG][mC][mC][mG][fA |
| | | ][mU][mC][fU][mC][m | | ][mC][mU][mG][mG][m |
| | | A][idT] | | G][*mU][*mU] |
| R5 | 167 | [mC*][mC*][fC][mU][ | 300 | [fU*][fG*][mA][mA][ |
| | | mG][mC][fC][fC][fA] | | mG][mC][mC][mG][mA] |
| | | [mG][mU][fC][mG][mG | | [mC][mU][mG][mG][fG |
| | | ][mC][mU][fU][mC][m | | ][mC][mA][mG][mG][m |
| | | A][mU][*mU][*idT] | | G][*mU][*mU] |
| S5 | 168 | [mC*][mC*][fU][mG][ | 301 | [fU*][fA*][mG][mA][ |
| | | mC][mC][fC][fA][fG] | | mA][mG][mC][mC][mG] |
| | | [mU][mC][fG][mG][mC | | [mA][mC][mU][mG][fG |
| | | ][mU][mU][fC][mU][m | | ][mG][mC][mA][mG][m |
| | | A][mU][*mU][*idT] | | G][*mU][*mU] |
| T5 | 169 | [mU*][mG*][fC][mC][ | 302 | [fU*][fG*][mA][mA][ |
| | | mC][mA][fG][fU][fC] | | mG][mA][mA][mG][mC] |
| | | [mG][mG][fC][mU][mU | | [mC][mG][mA][mC][fU |
| | | ][mC][mU][fU][mC][m | | ][mG][mG][mG][mC][m |
| | | A][mU][*mU][*idT] | | A][*mU][*mU] |
| U5 | 170 | [mG*][mC*][fC][mC][ | 303 | [fU*][fA*][mG][mA][ |
| | | mA][mG][fU][fC][fG] | | mA][mG][mA][mA][mG] |
| | | [mG][mC][fU][mU][mC | | [mC][mC][mG][mA][fC |
| | | ][mU][mU][fC][mU][m | | ][mU][mG][mG][mG][m |
| | | A][mU][*mU][*idT] | | C][*mU][*mU] |
| V5 | 171 | [mC*][mC*][fC][mA][ | 304 | [fU*][fG*][mA][mG][ |
| | | mG][mU][fC][fG][fG] | | mA][mA][mG][mA][mA] |
| | | [mC][mU][fU][mC][mU | | [mG][mC][mC][mG][fA |
| | | ][mU][mC][fU][mC][m | | ][mC][mU][mG][mG][m |
| | | A][mU][*mU][*idT] | | G][*mU][*mU] |
| W5 | 172 | [mC*][mC*][fA][mG][ | 305 | [fU*][fG*][mG][mA][ |
| | | mU][mC][fG][fG][fC] | | mG][mA][mA][mG][mA] |
| | | [mU][mU][fC][mU][mu | | [mA][mG][mC][mC][fG |
| | | ][mC][mU][fC][mC][m | | ][mA][mC][mU][mG][m |
| | | A][mU][*mU][*idT] | | G][*mU][*mU] |
| X5 | 173 | [mC*][mA*][fG][mU][ | 306 | [fU*][fU*][mG][mG][ |
| | | mC][mG][fG][fC][fU] | | mA][mG][mA][mA][mG] |
| | | [mU][mC][fU][mU][mC | | [mA][mA][mG][mC][fC |
| | | ][mU][mC][fU][mU][m | | ][mG][mA][mC][mU][m |
| | | A][mU][*mU][*idT] | | G][*mU][*mU] |
| Y5 | 174 | [mG*][mC*][fU][mG][ | 307 | [fU*][fC*][mU][mC][ |
| | | mC][mU][fC][fC][fA] | | mC][mU][mG][mC][mA] |
| | | [mG][mU][fG][mC][mA | | [mC][mU][mG][mG][fA |
| | | ][mG][mG][fA][mG][m | | ][mG][mC][mA][mG][m |
| | | A][mU][*mU][*idT] | | C][*mU][*mU] |
| Z5 | 175 | [mC*][mU*][fG][mC][ | 308 | [fU*][fU*][mC][mU][ |
| | | mU][mC][fC][fA][fG] | | mC][mC][mU][mG][mC] |
| | | [mU][mG][fC][mA][mG | | [mA][mC][mU][mG][fG |
| | | ][mG][mA][fG][mA][m | | ][mA][mG][mC][mA][m |
| | | A][mU][*mU][*idT] | | G][*mU][*mU] |
| A6 | 176 | [mA*][mG*][fU][mC][ | 309 | [fU*][fC*][mU][mG][ |
| | | mG][mC][fA][fU][fC] | | mC][mA][mC][mU][mG] |
| | | [mU][mC][fA][mG][mU | | [mA][mG][mA][mU][fG |
| | | ][mG][mC][fA][mG][m | | ][mC][mG][mA][mC][m |
| | | A][mU][*mU][*idT] | | U][*mU][*mU] |
| B6 | 177 | [mU*][mC*][fG][mC][ | 310 | [fU*][fU*][mC][mC][ |
| | | mA][mU][fC][fU][fC] | | mU][mG][mC][mA][mC] |
| | | [mA][mG][fU][mG][mC | | [mU][mG][mA][mG][fA |
| | | ][mA][mG][fG][mA][m | | ][mU][mG][mC][mG][m |
| | | A][mU][*mU][*idT] | | A][*mU][*mU] |
| C6 | 178 | [mA*][mG*][fU][mC][ | 311 | [mU*][fU*][mU][mG][ |
| | | mG][mG][fC][fU][fU] | | mG][mA][mG][mA][mA] |
| | | [mC][mU][fU][mC][mU | | [mG][mA][mA][mG][fC |
| | | ][mC][mC][fA][mA][m | | ][mC][mG][mA][mC][m |
| | | A][mU][*mU][*idT] | | U][*mU][*mU] |

Abbreviations Key:
n/N = any nucleotide
mN = 2'-O-Methyl substitution
fN = 2'-F substitution
idT = inverted Dt
vinmN or vinmU = 2'-O methyl vinyl phosphonate uridine
* = phosphorothioate
The brackets indicate the individual bases.

TABLE 3B
siRNA Sense and Antisense Sequences (Unmodified)

| SEQ | | SEQ | |
|---|---|---|---|
| ID NO: | Sense Strand 5′-3′ | ID NO: | Antisense Strand 5′-3′ |
| 673 | AGAACCACCCACUGCAUGA | 806 | UCAUGCAGUGGGUGGUUCUUU |
| 674 | AGAAAAACAGUACCUAAUA | 807 | UAUUAGGUACUGUUUUUCUUU |
| 675 | GAAACUGGUGAGUGACUGA | 808 | UCAGUCACUCACCAGUUUCUU |
| 676 | AAACUGGUGAGUGACUGCA | 809 | UGCAGUCACUCACCAGUUUUU |
| 677 | AGUUCACUGAAACGGAAUA | 810 | UAUUCCGUUUCAGUGAACUUU |
| 678 | GGAAUGCCUUCCUUGCGGA | 811 | UCCGCAAGGAAGGCAUUCCUU |
| 679 | UGCCUUCCUUGCGGUGAAA | 812 | UUUCACCGCAAGGAAGGCAUU |
| 680 | GCCUUCCUUGCGGUGAAAA | 813 | UUUUCACCGCAAGGAAGGCUU |
| 681 | CCUUCCUUGCGGUGAAAGA | 814 | UCUUUCACCGCAAGGAAGGUU |
| 682 | CUUCCUUGCGGUGAAAGCA | 815 | UGCUUUCACCGCAAGGAAGUU |
| 683 | UUCCUUGCGGUGAAAGCGA | 816 | UCGCUUUCACCGCAAGGAAUU |
| 684 | UCCUUGCGGUGAAAGCGAA | 817 | UUCGCUUUCACCGCAAGGAUU |
| 685 | CCUUGCGGUGAAAGCGAAA | 818 | UUUCGCUUUCACCGCAAGGUU |
| 686 | CUUGCGGUGAAAGCGAAUA | 819 | UAUUCGCUUUCACCGCAAGUU |
| 687 | UUGCGGUGAAAGCGAAUUA | 820 | UAAUUCGCUUUCACCGCAAUU |
| 688 | UGCGGUGAAAGCGAAUUCA | 821 | UGAAUUCGCUUUCACCGCAUU |
| 689 | CGGUGAAAGCGAAUUCCUA | 822 | UAGGAAUUCGCUUUCACCGUU |
| 690 | GGUGAAAGCGAAUUCCUAA | 823 | UUAGGAAUUCGCUUUCACCUU |
| 691 | UGAAAGCGAAUUCCUAGAA | 824 | UUCUAGGAAUUCGCUUUCAUU |
| 692 | GAAAGCGAAUUCCUAGACA | 825 | UGUCUAGGAAUUCGCUUUCUU |
| 693 | AAAGCGAAUUCCUAGACAA | 826 | UUGUCUAGGAAUUCGCUUUUU |
| 694 | AAGCGAAUUCCUAGACACA | 827 | UGUGUCUAGGAAUUCGCUUUU |
| 695 | AGCGAAUUCCUAGACACCA | 828 | UGGUGUCUAGGAAUUCGCUUU |
| 696 | CUAGACACCUGGAACAGAA | 829 | UUCUGUUCCAGGUGUCUAGUU |
| 697 | CAGCACAAAUACUGCGACA | 830 | UGUCGCAGUAUUUGUGCUGUU |
| 698 | AGCACAAAUACUGCGACCA | 831 | UGGUCGCAGUAUUUGUGCUUU |
| 699 | GCACAAAUACUGCGACCCA | 832 | UGGGUCGCAGUAUUUGUGCUU |
| 700 | UACUGCGACCCCAACCUAA | 833 | UUAGGUUGGGGUCGCAGUAUU |
| 701 | ACUGCGACCCCAACCUAGA | 834 | UCUAGGUUGGGGUCGCAGUUU |
| 702 | CUGCGACCCCAACCUAGGA | 835 | UCCUAGGUUGGGGUCGCAGUU |
| 703 | GACCCCAACCUAGGGCUUA | 836 | UAAGCCCUAGGUUGGGGUCUU |
| 704 | ACCCCAACCUAGGGCUUCA | 837 | UGAAGCCCUAGGUUGGGGUUU |
| 705 | CCCCAACCUAGGGCUUCGA | 338 | UCGAAGCCCUAGGUUGGGGUU |
| 706 | CCUAGGGCUUCGGGUCCAA | 839 | UUGGACCCGAAGCCCUAGGUU |
| 707 | UCGGGUCCAGCAGAAGGGA | 840 | UCCCUUCUGCUGGACCCGAUU |
| 708 | GAAGGCUGGCACUGUACGA | 841 | UCGUACAGUGCCAGCCUUCUU |
| 709 | GGCACUGUACGAGUGAGGA | 842 | UCCUCACUCGUACAGUGCCUU |
| 710 | GUACGAGUGAGGCCUGUGA | 843 | UCACAGGCCUCACUCGUACUU |
| 711 | UGUCCUGCACCGCUCAUGA | 844 | UCAUGAGCGGUGCAGGACAUU |
| 712 | UGCACCGCUCAUGCUCGCA | 845 | UGCGAGCAUGAGCGGUGCAUU |
| 713 | GCACCGCUCAUGCUCGCCA | 846 | UGGCGAGCAUGAGCGGUGCUU |
| 714 | CCGCUCAUGCUCGCCCGGA | 847 | UCCGGGCGAGCAUGAGCGGUU |
| 715 | CCCGGCUUUGGGGUCAAGA | 848 | UCUUGACCCCAAAGCCGGGUU |
| 716 | CUGAUACCAUCUGCGAGCA | 849 | UGCUCGCAGAUGGUAUCAGUU |
| 717 | UGAUACCAUCUGCGAGCCA | 850 | UGGCUCGCAGAUGGUAUCAUU |
| 718 | CUGCCCAGUCGGCUUCUUA | 851 | UAAGAAGCCGACUGGGCAGUU |
| 719 | GUGUCAUCUGCUUUCGAAA | 852 | UUUCGAAAGCAGAUGACACUU |
| 720 | UGUCAUCUGCUUUCGAAAA | 853 | UUUUCGAAAGCAGAUGACAUU |
| 721 | UCAUCUGCUUUCGAAAAAA | 854 | UUUUUUCGAAAGCAGAUGAUU |
| 722 | UUCGAAAAAUGUCACCCUA | 855 | UAGGGUGACAUUUUUCGAAUU |
| 723 | UCGAAAAAUGUCACCCUUA | 856 | UAAGGGUGACAUUUUUCGAUU |
| 724 | AAAAUGUCACCCUUGGACA | 857 | UGUCCAAGGGUGACAUUUUUU |
| 725 | UGAUCCCCAUCAUCUUCGA | 858 | UCGAAGAUGAUGGGGAUCAUU |
| 726 | CCCCAUCAUCUUCGGGAUA | 859 | UAUCCCGAAGAUGAUGGGGUU |
| 727 | AUCUUCGGGAUCCUGUUUA | 860 | UAAACAGGAUCCCGAAGAUUU |
| 728 | AAGAAGCCAACCAAUAAGA | 861 | UCUUAUUGGUUGGCUUCUUUU |
| 729 | AAGCCAACCAAUAAGGCCA | 862 | UGGCCUUAUUGGUUGGCUUUU |
| 730 | AGAUCAAUUUUCCCGACGA | 863 | UCGUCGGGAAAAUUGAUCUUU |
| 731 | GAUCAAUUUUCCCGACGAA | 864 | UUCGUCGGGAAAAUUGAUCUU |
| 732 | AUCAAUUUUCCCGACGAUA | 865 | UAUCGUCGGGAAAAUUGAUUU |
| 733 | UCAAUUUUCCCGACGAUCA | 866 | UGAUCGUCGGGAAAAUUGAUU |
| 734 | CGACGAUCUUCCUGGCUCA | 867 | UGAGCCAGGAAGAUCGUCGUU |
| 735 | ACGAUCUUCCUGGCUCCAA | 868 | UUGGAGCCAGGAAGAUCGUUU |
| 736 | GAUCUUCCUGGCUCCAACA | 869 | UGUUGGAGCCAGGAAGAUCUU |
| 737 | UGCAGGAGACUUUACAUGA | 870 | UCAUGUAAAGUCUCCUGCAUU |
| 738 | CAGGAGACUUUACAUGGAA | 871 | UUCCAUGUAAAGUCUCCUGUU |
| 739 | GGAGACUUUACAUGGAUGA | 872 | UCAUCCAUGUAAAGUCUCCUU |
| 740 | AGGAUGGCAAAGAGAGUCA | 873 | UGACUCUCUUUGCCAUCCUUU |
| 741 | GGAUGGCAAAGAGAGUCGA | 874 | UCGACUCUCUUUGCCAUCCUU |
| 742 | UGGCAAAGAGAGUCGCAUA | 875 | UAUGCGACUCUCUUUGCCAUU |
| 743 | GGCAAAGAGAGUCGCAUCA | 876 | UGAUGCGACUCUCUUUGCCUU |
| 744 | GCAAAGAGAGUCGCAUCUA | 877 | UAGAUGCGACUCUCUUUGCUU |
| 745 | AAAGAGAGUCGCAUCUCAA | 878 | UUGAGAUGCGACUCUCUUUUU |
| 746 | AAGAGAGUCGCAUCUCAGA | 879 | UCUGAGAUGCGACUCUCUUUU |
| 747 | AGAGAGUCGCAUCUCAGUA | 880 | UACUGAGAUGCGACUCUCUUU |
| 748 | GAGAGUCGCAUCUCAGUGA | 881 | UCACUGAGAUGCGACUCUCUU |
| 749 | AGAGUCGCAUCUCAGUGCA | 882 | UGCACUGAGAUGCGACUCUUU |
| 750 | GAGUCGCAUCUCAGUGCAA | 883 | UUGCACUGAGAUGCGACUCUU |
| 751 | GUCGCAUCUCAGUGCAGGA | 884 | UCCUGCACUGAGAUGCGACUU |
| 752 | CUGCUGUGGCGUGAGGGUA | 885 | UACCCUCACGCCACAGCAGUU |
| 753 | GGCACUGACUGGGCAUAGA | 886 | UCUAUGCCCAGUCAGUGCCUU |
| 754 | GGGCAUAGCUCCCCGCUUA | 887 | UAAGCGGGGAGCUAUGCCCUU |
| 755 | AGAACCUCUCACUUCACCA | 888 | UGGUGAAGUGAGAGGUUCUUU |
| 756 | GAACCUCUCACUUCACCCA | 889 | UGGGUGAAGUGAGAGGUUCUU |
| 757 | AGUCUCCCAACUUGUAUUA | 890 | UAAUACAAGUUGGGAGACUUU |
| 758 | GGUUUAGUAAUAUCCACCA | 891 | UGGUGGAUAUUACUAAACCUU |
| 759 | GUUUAGUAAUAUCCACCAA | 892 | UUGGUGGAUAUUACUAAACUU |
| 760 | UUUAGUAAUAUCCACCAGA | 893 | UCUGGUGGAUAUUACUAAAUU |
| 761 | GUAAUAUCCACCAGACCUA | 894 | UAGGUCUGGUGGAUAUUACUU |
| 762 | UAAUAUCCACCAGACCUUA | 895 | UAAGGUCUGGUGGAUAUUAUU |
| 763 | CAUGGUGGCUUCCCUGCGA | 896 | UCGCAGGGAAGCCACCAUGUU |
| 764 | UGCGCCCAGGAAGCCAUAA | 897 | UUAUGGCUUCCUGGGCGCAUU |
| 765 | CGCCCAGGAAGCCAUAUAA | 898 | UUAUAUGGCUUCCUGGGCGUU |
| 766 | AGCCAUAUACACAGAUGCA | 899 | UGCAUCUGUGUAUAUGGCUUU |
| 767 | GCCAUAUACACAGAUGCCA | 900 | UGGCAUCUGUGUAUAUGGCUU |
| 768 | UUGUUUGUGAUAGUGAACA | 901 | UGUUCACUAUCACAAACAAUU |
| 769 | GGAAGCUGCUUAACUGUCA | 902 | UGACAGUUAAGCAGCUUCCUU |
| 770 | GCUGCUUAACUGUCCAUCA | 903 | UGAUGGACAGUUAAGCAGCUU |
| 771 | AGCAGGAGACUGGCUAAAA | 904 | UUUUAGCCAGUCUCCUGCUUU |
| 772 | GCAGGAGACUGGCUAAAUA | 905 | UAUUUAGCCAGUCUCCUGCUU |
| 773 | CAGGAGACUGGCUAAAUAA | 906 | UUAUUUAGCCAGUCUCCUGUU |
| 774 | AUACAACAGAAUCUCAAAA | 907 | UUUUGAGAUUCUGUUGUAUUU |
| 775 | CAGAAAACCCACAGCUCGA | 908 | UCGAGCUGUGGGUUUUCUGUU |
| 776 | ACCCACAGCUCGAAGAGUA | 909 | UACUCUUCGAGCUGUGGGUUU |
| 777 | GCUCGAAGAGUGGUGACGA | 910 | UCGUCACCACUCUUCGAGCUU |
| 778 | UCGAAGAGUGGUGACGUCA | 911 | UGACGUCACCACUCUUCGAUU |
| 779 | GAAGAGUGGUGACGUCUGA | 912 | UCAGACGUCACCACUCUUCUU |
| 780 | GGUUGGUUAAAGGGAGAUA | 913 | UAUCUCCCUUUAACCAACCUU |
| 781 | UUGGCUUUCCCAUAAUGCA | 914 | UGCAUUAUGGGAAAGCCAAUU |
| 782 | CCCUGCCCAGUCGGCUUCA | 915 | UGAAGCCGACUGGGCAGGGUU |
| 783 | CCUGCCCAGUCGGCUUCUA | 916 | UAGAAGCCGACUGGGCAGGUU |
| 784 | UGCCCAGUCGGCUUCUUCA | 917 | UGAAGAAGCCGACUGGGCAUU |
| 785 | GCCCAGUCGGCUUCUUCUA | 918 | UAGAAGAAGCCGACUGGGCUU |
| 786 | CCAGUCGGCUUCUUCUCCA | 919 | UGGAGAAGAAGCCGACUGGUU |
| 787 | CAGUCGGCUUCUUCUCCAA | 920 | UUGGAGAAGAAGCCGACUGUU |
| 788 | AGUCGGCUUCUUCUCCAAA | 921 | UUUGGAGAAGAAGCCGACUUU |
| 789 | GCUGCUCCAGUGCAGGAGA | 922 | UCUCCUGCACUGGAGCAGCUU |
| 790 | CUGCUCCAGUGCAGGAGAA | 923 | UUCUCCUGCACUGGAGCAGUU |
| 791 | AGUCGCAUCUCAGUGCAGA | 924 | UCUGCACUGAGAUGCGACUUU |
| 792 | UCGCAUCUCAGUGCAGGAA | 925 | UUCCUGCACUGAGAUGCGAUU |
| 793 | CCCAGUCGGCUUCUUCUCA | 926 | UGAGAAGAAGCCGACUGGGUU |
| 794 | CCCUGCCCAGUCGGCUUCAUU | 927 | UGAAGCCGACUGGGCAGGGUU |
| 795 | CCUGCCCAGUCGGCUUCUAUU | 928 | UAGAAGCCGACUGGGCAGGUU |
| 796 | UGCCCAGUCGGCUUCUUCAUU | 929 | UGAAGAAGCCGACUGGGCAUU |
| 797 | GCCCAGUCGGCUUCUUCUAUU | 930 | UAGAAGAAGCCGACUGGGCUU |
| 798 | CCCAGUCGGCUUCUUCUCAUU | 931 | UGAGAAGAAGCCGACUGGGUU |
| 799 | CCAGUCGGCUUCUUCUCCAUU | 932 | UGGAGAAGAAGCCGACUGGUU |
| 800 | CAGUCGGCUUCUUCUCCAAUU | 933 | UUGGAGAAGAAGCCGACUGUU |
| 801 | GCUGCUCCAGUGCAGGAGAUU | 934 | UCUCCUGCACUGGAGCAGCUU |
| 802 | CUGCUCCAGUGCAGGAGAAUU | 935 | UUCUCCUGCACUGGAGCAGUU |
| 803 | AGUCGCAUCUCAGUGCAGAUU | 936 | UCUGCACUGAGAUGCGACUUU |
| 804 | UCGCAUCUCAGUGCAGGAAUU | 937 | UUCCUGCACUGAGAUGCGAUU |
| 805 | AGUCGGCUUCUUCUCCAAAUU | 938 | UUUGGAGAAGAAGCCGACUUU |

TABLE 4A
siRNA Sense and Antisense Sequences (Modified)

| siRNA | SEQ | | SEQ | |
|---|---|---|---|---|
| Pair | ID NO: | Sense Strand 5′-3′ | ID NO: | Antisense Strand 5′-3′ |
| D6 | 312 | [mG*][mA*][fG][mU][ | 332 | [vinmU*][fU*][mG][m |
| | | mC][mG][fC][fA][fU] | | C][mA][mC][mU][mG][ |
| | | [mC][mU][fC][mA][mG | | mA][mG][mA][mU][mG] |
| | | ][mU][mG][fC][mA][m | | [fC][mG][mA][mC][mU |
| | | A] | | ][mC][*mU][*mU] |
| E6 | 313 | [mG*][mU*][fC][mG][ | 333 | [vinmU*][fC*][mC][m |
| | | mC][mA][fU][fC][fU] | | U][mG][mC][mA][mC][ |
| | | [mC][mA][fG][mU][mG | | mU][mG][mA][mG][mA] |
| | | ][mC][mA][fG][mG][m | | [fU][mG][mC][mG][mA |
| | | A] | | ][mC][*mU][*mU] |
| F6 | 314 | [mA*][mG*][fA][mA][ | 334 | [vinmU*][fG*][mG][m |
| | | mC][mC][fU][fC][fU] | | U][mG][mA][mA][mG][ |
| | | [mC][mA][fC][mU][mU | | mU][mG][mA][mG][mA] |
| | | ][mC][mA][fC][mC][m | | [fG][mG][mU][mU][mc |
| | | A] | | ][mU][*mU][*mU] |
| G6 | 315 | [mG*][mA*][fA][mC][ | 335 | [vinmU*][fG*][mG][m |
| | | mC][mU][fC][fU][fC] | | G][mU][mG][mA][mA][ |
| | | [mA][mC][fU][mU][mC | | mG][mU][mG][mA][mG] |
| | | ][mA][mC][fC][mC][m | | [fA][mG][mG][mU][mU |
| | | A] | | ][mC][*mU][*mU] |
| H6 | 316 | [mA*][mG*][fU][mC][ | 336 | [vinmU*][fA*][mA][m |
| | | mU][mC][fC][fC][fA] | | U][mA][mC][mA][mA][ |
| | | [mA][mC][fU][mU][mG | | mG][mU][mU][mG][mG] |
| | | ][mU][mA][fU][mu][m | | [fG][mA][mG][mA][mC |
| | | A] | | ][mU][*mU][*mU] |
| I6 | 317 | [mG*][mG*][fA][mA][ | 337 | [vinmU*][fG*][mA][m |
| | | mG][mC][fU][fG][fC] | | C][mA][mG][mU][mU][ |
| | | [mU][mU][fA][mA][mc | | mA][mA][mG][mC][mA] |
| | | ][mU][mG][fU][mC][m | | [fG][mC][mU][mU][mc |
| | | A] | | ][mC][*mU][*mU] |
| J6 | 318 | [mG*][mC*][fA][mG][ | 338 | [vinmU*][fA*][mU][m |
| | | mG][mA][fG][fA][fC] | | U][mU][mA][mG][mC][ |
| | | [mU][mG][fG][mC][mU | | mC][mA][mG][mU][mC] |
| | | ][mA][mA][fA][mU][m | | [fU][mC][mC][mU][mG |
| | | A] | | ][mC][*mU][*mU] |
| K6 | 319 | [mU*][mU*][fA][mU][ | 339 | [vinmU*][fC*][mA][m |
| | | mC][mC][fU][fU][fu] | | A][mG][mA][mA][mA][ |
| | | [mG][mG][fU][mU][mU | | mC][mC][mA][mA][mA] |
| | | ][mC][mU][fU][mG][m | | [fG][mG][mA][mU][mA |
| | | A] | | ][mA][*mU][*mU] |
| L6 | 320 | [mG*][mU*][[G][mU][ | 340 | [vinmU*][fU*][mC][m |
| | | mG][mU][fU][fA][fC] | | A][mC][mU][mG][mC][ |
| | | [mG][mU][fG][mC][mA | | mA][mC][mG][mU][mA] |
| | | ][mG][mU][fG][mA][m | | [fA][mC][mA][mC][mA |
| | | A][mU][mU] | | ][mC][*mU][*mG] |
| M6 | 321 | [mU*][mG*][fU][mU][ | 341 | [vinmU*][fU*][mC][m |
| | | mC][mC][fA][fC][fU] | | U][mC][mA][mG][mC][ |
| | | [mG][mG][fG][mC][mU | | mC][mC][mA][mG][mU] |
| | | ][mG][mA][fG][mA][m | | [fG][mG][mA][mA][mC |
| | | A] | | ][mA][*mU][*mU] |
| N6 | 322 | [mG*][mC*][fG][mA][ | 342 | [vinmU*][fA*][mG][m |
| | | mA][mU][fU][fC][fC] | | G][mU][mG][mU][mC][ |
| | | [mU][mA][fG][mA][mC | | mU][mC][mG][mG][mA] |
| | | ][mA][mC][fC][mU][m | | [fA][mU][mU][mC][mG |
| | | A][mU][mU] | | ][mC][*mU][*mU] |
| O6 | 323 | [mG*][mU*][fG][mU][ | 343 | [vinmU*][fA*][mG][m |
| | | mG][mU][fU][fA][fC] | | U][mC][mA][mC][mU][ |
| | | [mG][mU][fG][mC][mA | | mG][mC][mA][mC][mG] |
| | | ][mG][mU][fG][mA][m | | [fU][mA][mA][mC][mA |
| | | C][mU][mA] | | ][mC][mA][mC][*mU][ |
| | | | | *mG] |
| P6 | 324 | [mA*][mC*][fU][mA][ | 344 | [vinmU*][fG*][mG][m |
| | | mC][mA][fA][fG][fA] | | U][mC][mA][mC][mG][ |
| | | [mC][mU][fC][mG][mU | | mA][mG][mU][mC][mU] |
| | | ][mG][mA][fC][mC][m | | [fU][mG][mU][mA][mG |
| | | A][mU][mu] | | ][mU][*mU][*mU] |
| Q6 | 325 | [fG*][mU*][fG][mU][ | 345 | [vinmU*][fU*][mC][f |
| | | fG][mU][fU][mA][fC] | | A][mC][fU][mG][fC][ |
| | | [mG][fU][mG][fC][mA | | mA][fC][mG][fU][Am] |
| | | ][fG][mU][fG][mA][f | | [fA][mC][fA][mC][fA |
| | | A][mU][mU] | | ][mC][*mU][*mG] |
| R6 | 326 | [fG*][mC*][[G][mA][ | 346 | [vinmU*][fA*][mG][f |
| | | fA][mU][fU][mC][fc] | | G][mU][fG][mu][fC][ |
| | | [mU][fA][mG][fA][mc | | mU][fC][mG][fG][mA] |
| | | ][fA][mC][fC][mU][f | | [fA][mU][fU][mC][fG |
| | | A][mU][mU] | | ][mC][*mU][*mU] |
| S6 | 327 | [fG*][mU*][fG][mU][ | 347 | [vinmU*][fA*][mG][f |
| | | fG][mU][fU][mA][fC] | | U][mC][fA][mC][fu][ |
| | | [mG][fU][mG][fC][mA | | mG][fC][mA][fC][mG] |
| | | ][fG][mU][fG][mA][f | | [fU][mA][fA][mC][fA |
| | | C][mU][mA] | | ][mC][fA][mC][*fU][ |
| | | | | *mG] |
| T6 | 328 | [mU*][mC*][fC][mU][ | 348 | [vinmU*][fU*][mC][m |
| | | mU][mG][fC][fG][fG] | | G][mC][mU][mU][mU][ |
| | | [mU][mG][fA][mA][mA | | mC][mA][mC][mC][mG] |
| | | ][mG][mC][fG][mA][m | | [fC][mA][mA][mG][mG |
| | | A] | | ][mA][*mU][*mU] |
| U6 | 329 | [mG*][mU*][fA][mA][ | 349 | [vinmU*][fA*][mG][m |
| | | mU][mA][fU][fC][fC] | | G][mU][mC][mU][mG][ |
| | | [mA][mC][fC][mA][mG | | mG][mU][mG][mG][mA] |
| | | ][mA][mC][fC][mU][m | | [fU][mA][mU][mU][mA |
| | | A] | | ][mC][*mU][*mU] |
| V6 | 330 | [mU*][mU*][fG][mU][ | 350 | [vinmU*][fG*][mU][m |
| | | mU][mU][fG][fU][fG] | | U][mC][mA][mC][mU][ |
| | | [mA][mU][fA][mG][mU | | mA][mU][mC][mA][mC] |
| | | ][mG][mA][fA][mC][m | | [fA][mA][mA][mC][mA |
| | | A] | | ][mA][*mU][*mU] |
| W6 | 331 | [mG*][mC*][fU][mG][ | 351 | [vinmU*][fG*][mA][m |
| | | mC][mU][fU][[A][[A] | | U][mG][mG][mA][mC][ |
| | | [mC][mU][fG][mU][mC | | mA][mG][mU][mU][mA] |
| | | ][mC][mA][fU][mC][m | | [fA][mG][mC][mA][mG |
| | | A] | | ][mC][*mU][*mU] |
| B7 | 1850 | [mA*][mG*][fC][mA][ | 1960 | [vinmU*][fU*][mU][m |
| | | mG][mG][fA][fG][fA] | | U][mA][mG][mC][mC][ |
| | | [mC][mU][fG][mG][mC | | mA][mG][mU][mC][mU] |
| | | ][mU][mA][fA][mA][m | | [fC][mC][mU][mG][mC |
| | | A] | | ][mU][*mU][*mU] |
| C7 | 1851 | [mC*][mA*][[G][mG][ | 1961 | [vinmu*][fU*][mA][m |
| | | mA][mG][fA][fC][fU] | | U][mU][mU][mA][mG][ |
| | | [mG][mG][fC][mU][mA | | mC][mC][mA][mG][mU] |
| | | ][mA][mA][fU][mA][m | | [fC][mU][mC][mC][mU |
| | | A] | | ][mG][*mU][*mU] |
| P8 | 1890 | [mA*][mG*][fA][mA][ | 2000 | [vin][mU][*fU][*mC] |
| | | mA][mC][fA][fG][fU] | | [mA][mA][mG][mG][mU |
| | | [mU][mC][fA][mC][mC | | ][mG][mA][mA][mC][m |
| | | ][mU][mU][fG][mA][m | | U][fG][mU][mU][Um][ |
| | | A] | | mC][m][*mU][*mU] |
| Q8 | 1891 | [mG*][mA*][fA][mA][ | 2001 | [vin][mU][*fU][*mU] |
| | | mC][mA][fG][fU][fU] | | [mC][mA][mA][mG][mG |
| | | [mC][mA][fC][mC][mU | | ][mU][mG][mA][mA][m |
| | | ][mU][mG][fA][mA][m | | C][fU][mG][mU][mu][ |
| | | A] | | mU][mC][*mU][*mU] |
| R8 | 1892 | [mA*][mA*][fC][mC][ | 2002 | [vin][mu][*[A][*mG] |
| | | mU][mC][fU][fC][fA] | | [mG][mG][mU][mG][mA |
| | | [mC][mU][fU][mC][mA | | ][mA][mG][mU][mG][m |
| | | ][mC][mC][fC][mU][m | | A][fG][mA][mG][mG][ |
| | | A] | | mU][mU][*mU][*mU] |
| S8 | 1893 | [mA*][mC*][fC][mU][ | 2003 | [vin][mU][*fC][*mA] |
| | | mC][mU][fC][fA][fC] | | [mG][mG][mG][mU][mG |
| | | [mU][mU][fC][mA][mC | | ][mA][mA][mG][mU][m |
| | | ][mC][mC][fU][mG][m | | G][fA][mG][mA][mG][ |
| | | A] | | mG][mU][*mU][*mU] |
| T8 | 1894 | [mC*][mC*][fU][mC][ | 2004 | [vin][mU][*fC][*mC] |
| | | mU][mC][fA][fC][fU] | | [mA][mG][mG][mG][mU |
| | | [mU][mC][fA][mC][mC | | ][mG][mA][mA][mG][m |
| | | ][mC][mU][fG][mG][m | | U][fG][mA][mG][mA][ |
| | | A] | | mG][mG][*mU][*mU] |
| U8 | 1895 | [mC*][mU*][fC][mU][ | 2005 | [vin][mU][*fU][*mC] |
| | | mC][mA][fC][fU][fU] | | [mC][mA][mG][mG][mG |
| | | [mC][mA][fC][mC][mC | | ][mU][mG][mA][mA][m |
| | | ][mU][mG][fG][mA][m | | G][fU][mG][mA][mG][ |
| | | A] | | mA][mG][*mU][*mU] |
| V8 | 1896 | [mU*][mC*][fU][mC][ | 2006 | [vin][mU][*fC][*mU] |
| | | mA][mC][fU][fU][fC] | | [mC][mC][mA][mG][mG |
| | | [mA][mC][fC][mC][mU | | ][mG][mU][mG][mA][m |
| | | ][mG][mG][fA][mG][m | | A][fG][mU][mG][mA][ |
| | | A] | | mG][mA][*mU][*mU] |
| W8 | 1897 | [mC*][mU*][fC][mA][ | 2007 | [vin][mU][*fG][*mC] |
| | | mC][mU][fU][fC][fA] | | [mU][mC][mC][mA][mG |
| | | [mC][mC][fC][mU][mG | | ][mG][mG][mU][mG][m |
| | | ][mG][mA][fG][mC][m | | A][fA][mG][mU][mG][ |
| | | A] | | mA][mG][*mU][*mU] |
| X8 | 1898 | [mU*][mC*][fA][mC][ | 2008 | [vinmU*][fG*][mG][m |
| | | mU][mU][fC][fA][fC] | | C][mU][mC][mC][mA][ |
| | | [mC][mC][fU][mG][mG | | mG][mG][mG][mU][mG] |
| | | ][mA][mG][fC][mC][m | | [fA][mA][mG][mU][mG |
| | | A] | | ][mA][*mU][*mU] |
| Y8 | 1899 | [mC*][mA*][fC][mU][ | 2009 | [vinmU*][fG*][mG][m |
| | | mU][mC][fA][fC][fC] | | G][mC][mU][mC][mC][ |
| | | [mC][mU][fG][mG][mA | | mA][mG][mG][mG][mU] |
| | | ][mG][mC][fC][mC][m | | [fG][mA][mA][mG][mU |
| | | A] | | ][mG][*mU][*mU] |
| Z8 | 1900 | [mA*][mC*][fU][mU][ | 2010 | [vinmU*][fU*][mG][m |
| | | mC][mA][fC][fC][fC] | | G][mG][mC][mU][mC][ |
| | | [mU][mG][fG][mA][mG | | mC][mA][mG][mG][mG] |
| | | ][mC][mC][fC][mA][m | | [fU][mG][mA][mA][mG |
| | | A] | | ][mU][*mU][*mU] |
| A9 | 1901 | [mC*][mU*][fU][mC][ | 2011 | [vinmU*][fA*][mU][m |
| | | mA][mC][fC][fC][fU] | | G][mG][mG][mC][mu][ |
| | | [mG][mG][fA][mG][mC | | mC][mC][mA][mG][mG] |
| | | ][mC][mC][fA][mU][m | | [fG][mU][mG][mA][mA |
| | | A] | | ][mG][*mU][*mU] |
| B9 | 1902 | [mU*][mU*][fC][mA][ | 2012 | [vinmU*][fG*][mA][m |
| | | mC][mC][fC][fU][fG] | | U][mG][mG][mG][mC][ |
| | | [mG][mA][fG][mC][mC | | mU][mC][mC][mA][mG] |
| | | ][mC][mA][fU][mC][m | | [fG][mG][mU][mG][mA |
| | | A] | | ][mA][*mU][*mU] |
| C9 | 1903 | [mU*][mC*][fA][mC][ | 2013 | [vinmU*][fG*][mG][m |
| | | mC][mC][fU][fG][fG] | | A][mU][mG][mG][mG][ |
| | | [mA][mG][fC][mC][mC | | mC][mU][mC][mC][mA] |
| | | ][mA][mU][fC][mC][m | | [fG][mG][mG][mU][mG |
| | | A] | | ][mA][*mU][*mU] |
| D9 | 1904 | [mC*][mA*][fC][mC][ | 2014 | [vinmU*][fU*][mG][m |
| | | mC][mU][fG][fG][fA] | | G][mA][mU][mG][mG][ |
| | | [mG][mC][fC][mC][mA | | mG][mC][mU][mC][mC] |
| | | ][mU][mC][fC][mA][m | | [fA][mG][mG][mG][mU |
| | | A] | | ][mG][*mU][*mU] |
| E9 | 1905 | [mA*][mC*][fC][mC][ | 2015 | [vinmU*][fC*][mU][m |
| | | mU][mG][fG][fA][fG] | | G][mG][mA][mU][mG][ |
| | | [mC][mC][fC][mA][mU | | mG][mG][mC][mU][mC] |
| | | ][mC][mC][fA][mG][m | | [fC][mA][mG][mG][mG |
| | | A] | | ][mU][*mU][*mU] |
| F9 | 1906 | [mC*][mC*][fC][mU][ | 2016 | [vinmU*][fA*][mC][m |
| | | mG][mG][fA][fG][fC] | | U][mG][mG][mA][mU][ |
| | | [mC][mC][fA][mU][mC | | mG][mG][mG][mC][mU] |
| | | ][mC][mA][fG][mU][m | | [fC][mC][mA][mG][mG |
| | | A] | | ][mG][*mU][*mU] |
| G9 | 1907 | [mC*][mC*][fU][mG][ | 2017 | [vinmU*][fG*][mA][m |
| | | mG][mA][fG][fC][fC] | | C][mU][mG][mG][mA][ |
| | | [mC][mA][fU][mC][mC | | mU][mG][mG][mG][mC] |
| | | ][mA][mG][fU][mC][m | | [fU][mC][mC][mA][mG |
| | | A] | | ][mG][*mU][*mU] |
| H9 | 1908 | [mC*][mU*][fG][mG][ | 2018 | [vinmU*][fA*][mG][m |
| | | mA][mG][fC][fC][fC] | | A][mC][mU][mG][mG][ |
| | | [mA][mU][fC][mC][mA | | mA][mU][mG][mG][mG] |
| | | ][mG][mU][fC][mU][m | | [fC][mU][mC][mC][mA |
| | | A] | | ][mG][*mU][*mU] |
| i9 | 1909 | [mC*][mU*][fG][mC][ | 2019 | [vinmU*][fU*][mG][m |
| | | mU][mU][fA][fA][fC] | | A][mU][mG][mG][mA][ |
| | | [mU][mG][fU][mC][mC | | mC][mA][mG][mU][mU] |
| | | ][mA][mU][fC][mA][m | | [fA][mA][mG][mC][mA |
| | | A] | | ][mG][*mU][*mU] |
| J9 | 1910 | [mU*][mG*][fC][mU][ | 2020 | [vinmU*][fC*][mU][m |
| | | mU][mA][fA][fC][fU] | | G][mA][mU][mG][mG][ |
| | | [mG][mU][fC][mC][mA | | mA][mC][mA][mG][mU] |
| | | ][mU][mC][fA][mG][m | | [fU][mA][mA][mG][mC |
| | | A] | | ][mA][*mU][*mU] |
| K9 | 1911 | [mG*][mC*][fU][mU][ | 2021 | [vinmU*][fG*][mC][m |
| | | mA][mA][fC][fU][fG] | | U][mG][mA][mU][mG][ |
| | | [mU][mC][fC][mA][mU | | mG][mA][mC][mA][mG] |
| | | ][mC][mA][fG][mC][m | | [fU][mU][mA][mA][mG |
| | | A] | | ][mC][*mU][*mU] |
| L9 | 1912 | [mC*][mU*][fU][mA][ | 2022 | [vinmU*][fU][mG][mC |
| | | mA][mC][fU][fG][fU] | | ][mU][mG][mA][mU][m |
| | | [mC][mC][fA][mU][mC | | G][mG][mA][mC][mA][ |
| | | ][mA][mG][fC][mA][m | | fG][mU][mU][mA][mA] |
| | | A] | | [mG][*mU][*mU] |
| M9 | 1913 | [mU*][mU*][fA][mA][ | 2023 | [vinmU*][fC*][mU][m |
| | | mC][mU][fG][fU][fC] | | G][mC][mU][mG][mA][ |
| | | [mC][mA][fU][mC][mA | | mU][mG][mG][mA][mC] |
| | | ][mG][mC][fA][mG][m | | [fA][mG][mU][mU][mA |
| | | A] | | ][mA][*mU][*mU] |
| N9 | 1914 | [mA*][mA*][fC][mU][ | 2024 | [vinmU*][fU*][mC][m |
| | | mG][mU][fC][fC][fA] | | C][mU][mG][mC][mU][ |
| | | [mU][mC][fA][mG][mC | | mG][mA][mU][mG][mG] |
| | | ][mA][mG][fG][mA][m | | [fA][mC][mA][mG][mU |
| | | A] | | ][mU][*mU][*mU] |
| O9 | 1915 | [mA*][mC*][fU][mG][ | 2025 | [vinmU*][fC*][mU][m |
| | | mU][mC][fC][fA][fU] | | C][mC][mU][mG][mC][ |
| | | [mC][mA][fG][mC][mA | | mU][mG][mA][mU][mG] |
| | | ][mG][mG][fA][mG][m | | [fG][mA][mC][mA][mG |
| | | A] | | ][mU][*mU][*mU] |
| P9 | 1916 | [mC*][mU*][fG][mU][ | 2026 | [vinmU*][fU*][mC][m |
| | | mC][mC][fA][fU][fC] | | U][mC][mC][mU][mG][ |
| | | [mA][mG][fC][mA][mG | | mC][mU][mG][mA][mU] |
| | | ][mG][mA][fG][mA][m | | [fG][mG][mA][mC][mA |
| | | A] | | ][mG][*mU][*mU] |
| Q9 | 1917 | [mG*][mU*][fC][mC][ | 2027 | [vinmU*][[A][mG][mU |
| | | mA][mU][[fC][fA][G] | | ][mC][mU][mC][mC][m |
| | | [mC][mA][fG][mG][mA | | U][mG][mC][mU][mG][ |
| | | ][mG][mA][fC][mU][m | | fA][mU][mG][mG][mA] |
| | | A] | | [mC][*mU][*mU] |
| R9 | 1918 | [mU*][mC*][fC][mA][ | 2028 | [vinmU*][fC*][mA][m |
| | | mU][mC][fA][fG][fC] | | G][mU][mC][mU][mC][ |
| | | [mA][mG][fG][mA][mG | | mC][mU][mG][mC][mU] |
| | | ][mA][mC][fU][mG][m | | [fG][mA][mU][mG][mG |
| | | A] | | ][mA][*mU][*mU] |
| S9 | 1919 | [mA*][mU*][fC][mA][ | 2029 | [vinmU*][fA*][mG][m |
| | | mG][mC][fA][fG][fG] | | C][mC][mA][mG][mU][ |
| | | [mA][mG][fA][mC][mU | | mC][mU][mC][mC][mU] |
| | | ][mG][mG][fC][mU][m | | [fG][mC][mU][mG][mA |
| | | A] | | ][mU][*mU][*mU] |
| T9 | 1920 | [mU*][mC*][fA][mG][ | 2030 | [vinmU*][fU*][mA][m |
| | | mC][mA][fG][fG][fA] | | G][mC][mC][mA][mG][ |
| | | [mG][mA][fC][mU][mG | | mU][mC][mU][mC][mC] |
| | | ][mG][mC][fU][mA][m | | [fU][mG][mC][mU][mG |
| | | A] | | ][mA][*mU][*mU] |
| U9 | 1921 | [mG*][mG*][fA][mG][ | 2031 | [vinmU*][fU*][mU][m |
| | | mA][mC][fU][fG][fG] | | U][mA][mU][mU][mu][ |
| | | [mC][mU][fA][mA][mA | | mA][mG][mC][mC][mA] |
| | | ][mU][mA][fA][mA][m | | [fG][mU][mC][mU][mC |
| | | A] | | ][mC][*mU][*mU] |
| V9 | 1922 | [mG*][mA*][fC][mU][ | 2032 | [vinmU*][fA*][mA][m |
| | | mG][mG][fC][fU][fA] | | U][mU][mU][mU][mA][ |
| | | [mA][mA][fU][mA][mA | | mU][mU][mU][mA][mG] |
| | | ][mA][mA][fU][mu][m | | [fC][mC][mA][mG][mU |
| | | A] | | ][mC][*mU][*mU] |
| W9 | 1923 | [mC*][mU*][fG][mG][ | 2033 | [vinmU*][fC*][mU][m |
| | | mC][mU][fA][fA][fA] | | A][mA][mU][mU][mu][ |
| | | [mU][mA][fA][mA][mA | | mU][mA][mU][mU][mU] |
| | | ][mU][mU][fA][mG][m | | [fA][mG][mC][mC][mA |
| | | A] | | ][mG][*mU][*mU] |
| X9 | 1924 | [mU*][mG*][fG][mC][ | 2034 | [vinmU*][fU*][mC][m |
| | | mU][mA][fA][fA][fU] | | U][mA][mA][mU][mu][ |
| | | [mA][mA][fA][mA][mU | | mU][mU][mA][mU][mU] |
| | | ][mU][mA][fG][mA][m | | [fU][mA][mG][mC][mC |
| | | A] | | ][mA][*mU][*mU] |
| Y9 | 1925 | [mG*][mG*][fC][mU][ | 2035 | [vinmU*][fU*][mU][m |
| | | mA][mA][fA][fU][fA] | | C][mU][mA][mA][mU][ |
| | | [mA][mA][fA][mU][mU | | mU][mU][mU][mA][mU] |
| | | ][mA][mG][fA][mA][m | | [fU][mU][mA][mG][mC |
| | | A] | | ][mC][*mU][*mU] |
| Z9 | 1926 | [mG*][mC*][fU][mA][ | 2036 | [vinmu*][fA*][mU][m |
| | | mA][mA][fU][fA][fA] | | U][mC][mU][mA][mA][ |
| | | [mA][mA][fU][mU][mA | | mU][mU][mU][mU][mA] |
| | | ][mG][mA][fA][mU][m | | [fU][mU][mU][mA][mG |
| | | A] | | ][mC][*mU][*mU] |
| A10 | 1927 | [mA*][mA*][fA][mU][ | 2037 | [vinmU*][fU*][mA][m |
| | | mA][mA][fA][fA][fU] | | U][mA][mU][mU][mC][ |
| | | [mU][mA][fG][mA][mA | | mU][mA][mA][mU][mU] |
| | | ][mU][mA][fU][mA][m | | [fU][mU][mA][mU][mu |
| | | A] | | ][mU][*mU][*mU] |
| B10 | 1928 | [mA*][mU*][fA][mA][ | 2038 | [vinmU*][fA*][mA][m |
| | | mA][mA][fU][fU][[A] | | U][mA][mU][mA][mU][ |
| | | [mG][mA][fA][mU][mA | | mU][mC][mU][mA][mA] |
| | | ][mU][mA][fU][mU][m | | [fU][mU][mU][mU][mA |
| | | A] | | ][mU][*mU][*mU] |
| F10 | 1932 | [mG*][mA*][fG][mU][ | 2042 | [vinmU*][fU*][mG][m |
| | | mC][mG][fC][fA][fU] | | C][mA][mC][mU][mG][ |
| | | [mC][mU][fC][mA][mG | | mA][mG][mA][mU][mG] |
| | | ][mU][mG][fC][mA][m | | [fC][mG][mA][mC][mU |
| | | A] | | ][mC][*mU][*mU] |
| G10 | 1933 | [mG*][mU*][fC][mG][ | 2043 | [vinmU*][fC*][mC][m |
| | | mC][mA][fU][fC][fU] | | U][mG][mC][mA][mC][ |
| | | [mC][mA][fG][mU][mG | | mU][mG][mA][mG][mA] |
| | | ][mC][mA][fG][mG][m | | [fU][mG][mC][mG][mA |
| | | A] | | ][mC][*mU][*mU] |
| H10 | 1934 | [mA*][mG*][fA][mA][ | 2044 | [vinmU*][fG*][mG][m |
| | | mC][mC][fU][fC][fu] | | U][mG][mA][mA][mG][ |
| | | [mC][mA][fC][mU][mU | | mU][mG][mA][mG][mA] |
| | | ][mC][mA][fC][mC][m | | [fG][mG][mU][mU][mC |
| | | A] | | ][mU][*mU][*mU] |
| I10 | 1935 | [mG*][mC*][fA][mG][ | 2045 | [vinmU*][fA*][mU][m |
| | | mG][mA][fG][fA][fC] | | U][mU][mA][mG][mC][ |
| | | [mU][mG][fG][mC][mU | | mC][mA][mG][mU][mC] |
| | | ][mA][mA][fA][mU][m | | [fU][mC][mC][mU][mG |
| | | A] | | ][mC][*mU][*mU] |
| J10 | 1936 | [mA*][mA*][fC][mA][ | 2046 | [vinmU*][fU*][mG][m |
| | | mG][mU][fA][fC][fC] | | U][mU][mU][mA][mu][ |
| | | [mU][mA][fA][mU][mA | | mU][mA][mG][mG][mU] |
| | | ][mA][mA][fC][mA][m | | [fA][mC][mU][mG][mU |
| | | A] | | ][mU][*mU][*mU] |
| K10 | 1937 | [fG*][mU*][fC][mG][ | 2047 | [vinmU*][fC*][mC][f |
| | | fC][mA][fU][mC][fU] | | U][mG][fC][mA][fC][ |
| | | [mC][fA][mG][fU][mG | | mU][fG][mA][fG][mA] |
| | | ][fC][mA][fG][mG][f | | [fU][mG][fC][mG][fA |
| | | A] | | ][mC][*mU][*mU] |
| L10 | 1938 | [fG*][mU*][fC][mG][ | 2048 | [vinmU*][fC*][mC][f |
| | | fC][mA][fU][fC][fU] | | U][mG][[C][fA][fC][ |
| | | [mC][fA][mG][mU][mG | | mU][fG][mA][mG][mA] |
| | | ][fC][mA][fG][mG][m | | [fU][mG][fC][mG][fA |
| | | A] | | ][mC][*fU][*mU] |
| M10 | 1939 | [mG][mA][[A][mC][mC | 2049 | [vinmU*][fG*][mG][m |
| | | ][mU][fC][fU][fC][m | | G][mU][mG][mA][mA][ |
| | | A][mC][fU][mU][mC][ | | mG][mU][mG][mA][mG] |
| | | mA][mC][fC][*mC][*m | | [fA][mG][mG][mU][mU |
| | | A] | | ][mC][*mU][*mU] |
| N10 | 1940 | [mG][mC][fA][mG][mG | 2050 | [vinmu*][fA*][mU][m |
| | | ][mA][fG][fA][fC][m | | U][mU][mA][mG][mC][ |
| | | U][mG][fG][mC][mu][ | | mC][mA][mG][mU][mC] |
| | | mA][mA][fA][*mu][*m | | [fU][mC][mC][mU][mG |
| | | A] | | ][mC][*mU][*mU] |
| O10 | 1941 | [mA][mG][fA][mA][mA | 2051 | [vinmU*][fU*][mC][m |
| | | ][mC][fA][fG][fU][m | | A][mA][mG][mG][mU][ |
| | | U][mC][fA][mC][mC][ | | mG][mA][mA][mC][mU] |
| | | mU][mU][fG][*mA][*m | | [fG][mU][mU][mU][mC |
| | | A] | | ][m][*mU][*mU] |
| P10 | 1942 | [mG][mA][fA][mA][mC | 2052 | [vinmU*][fU*][mU][m |
| | | ][mA][fG][fU][fU][m | | C][mA][mA][mG][mG][ |
| | | C][mA][fC][mC][mU][ | | mU][mG][mA][mA][mC] |
| | | mU][mG][fA][*mA][*m | | [fU][mG][mU][mU][mU |
| | | A] | | ][mC][*mU][*mU] |
| Q10 | 1943 | [mG][mA][fA][mA][mC | 2053 | [vinmU*][fU*][mU][m |
| | | ][mA][fG][fU][fU][m | | C][mA][mA][mG][mG][ |
| | | C][mA][fC][mC][mU][ | | mU][mG][mA][mA][mC] |
| | | mU][mG][fA][*mA][*m | | [fU][mG][mU][mU][mU |
| | | A] | | ][mC][*mU][*mU] |
| R10 | 1944 | [mA][mC][fC][mU][mC | 2054 | [vinmU*][fC*][mA][m |
| | | ][mU][fC][fA][fC][m | | G][mG][mG][mU][mG][ |
| | | U][mU][fC][mA][mC][ | | mA][mA][mG][mU][mG] |
| | | mC][mC][fU][*mG][*m | | [fA][mG][mA][mG][mG |
| | | A] | | ][mU][*mU][*mU] |
| S10 | 1945 | [mA][mC][fU][mU][mC | 2055 | [vinmU*][fU*][mG][m |
| | | ][mA][fC][fC][fC][m | | G][mG][mC][mU][mC][ |
| | | U][mG][fG][mA][mG][ | | mC][mA][mG][mG][mG] |
| | | mC][mC][fC][*mA][*m | | [fU][mG][mA][mA][mG |
| | | A] | | ][mU][*mU][*mU] |
| T10 | 1946 | [mG*][mA*][fA][mA][ | 2056 | [vinmU*][fU*][mU][m |
| | | mC][mA][fG][fU][fU] | | C][mA][mA][mG][mG][ |
| | | [mC][mA][fC][mC][mU | | mU][mG][mA][mA][mC] |
| | | ][mU][mG][fA][mA][m | | [fU][mG][mU][mU][mU |
| | | A] | | ][mC][*mU][*mU] |
| U10 | 1947 | [mG][mU][fC][mG][mC | 2057 | [vinmU*][fC*][mC][m |
| | | ][mA][fU][fC][fu][m | | U][mG][mC][mA][mC][ |
| | | C][mA][fG][mU][mG][ | | mU][mG][mA][mG][mA] |
| | | mC][mA][fG][*mG][*m | | [fU][mG][mC][mG][mA |
| | | A] | | ][mC][*mU][*mU] |
| V10 | 1948 | [mG][mU][fC][mG][mC | 2058 | [vinmU*][fC*][mC][m |
| | | ][mA][fU][fC][fU][m | | U][mG][mC][mA][mC][ |
| | | C][mA][fG][mU][mG][ | | mU][mG][mA][mG][mA] |
| | | mC][mA][fG][*mG][*m | | [fU][mG][mC][mG][mA |
| | | A] | | ][mC][*mU][*mU] |
| W10 | 1949 | [mG][mU][fC][mG][mC | 2059 | [vinmU*][fC*][mC][m |
| | | ][mA][fU][fC][fU][m | | U][mG][mC][mA][mC][ |
| | | C][mA][fG][mU][mG][ | | mU][mG][mA][mG][mA] |
| | | mC][mA][fG][*mG][*m | | [fU][mG][mC][mG][mA |
| | | A] | | ][mC][*mU][*mU] |
| X10 | 1950 | [mG][mU][fC][mG][mc | 2060 | [vinmU*][fC*][mC][m |
| | | ][mA][fU][fC][fU][m | | U][mG][mC][mA][mC][ |
| | | C][mA][fG][mU][mG][ | | mU][mG][mA][mG][mA] |
| | | mC][mA][fG][*mG][*m | | [fU][mG][mC][mG][mA |
| | | A] | | ][mC][*mU][*mU] |
| Y10 | 1951 | [mG][mU][fC][mG][mC | 2061 | [vinmU*][fC*][mC][m |
| | | ][mA][fU][fC][fU][m | | U][mG][mC][mA][mC][ |
| | | C][mA][fG][mU][mG][ | | mU][mG][mA][mG][mA] |
| | | mC][mA][fG][*mG][*m | | [fU][mG][mC][mG][mA |
| | | A] | | ][mC][*mU][*mU] |
| Z10 | 1952 | [mG][mU][fC][mG][mC | 2062 | [vinmU*][fC*][mC][m |
| | | ][mA][fU][fC][fU][m | | U][mG][mC][mA][mC][ |
| | | C][mA][fG][mU][mG][ | | mU][mG][mA][mG][mA] |
| | | mC][mA][fG][*mG][*m | | [fU][mG][mC][mG][mA |
| | | A] | | ][mC][*mU][*mU] |
| A11 | 1953 | [*][Mg][Mu][Fc][Mg] | 2063 | [vinmU*][fC*][mC][m |
| | | [Mc][Ma][Fu][Fc][Fu | | U][mG][mC][mA][mC][ |
| | | ][Mc][Ma][Fg][Mu][M | | mU][mG][mA][mG][mA] |
| | | g][Mc][Ma][Fg][*mG] | | [fU][mG][mC][mG][mA |
| | | [*mA] | | ][mC][*mU][*mU] |
| B11 | 1954 | [mG][mA][fA][mA][mC | 2064 | [vinmU*][fU*][mU][m |
| | | ][mA][fG][fU][fU][m | | C][mA][mA][mG][mG][ |
| | | C][mA][fC][mC][mu][ | | mU][mG][mA][mA][mC] |
| | | mU][mG][fA][*mA][*m | | [fU][mG][mU][mU][mU |
| | | A] | | ][mC][*mU][*mU] |
| C11 | 1955 | [mG][mA][fA][mA][mC | 2065 | [vinmU*][fU*][mU][m |
| | | ][mA][fG][fU][fU][m | | C][mA][mA][mG][mG][ |
| | | C][mA][fC][mC][mU][ | | mU][mG][mA][mA][mC] |
| | | mU][mG][fA][*mA][*m | | [fU][mG][mU][mU][mU |
| | | A] | | ][mC][*mU][*mU] |
| D11 | 1956 | [mG][mA][fA][mA][mC | 2066 | [vinmU*][fU*][mU][m |
| | | ][mA][fG][fU][fU][m | | C][mA][mA][mG][mG][ |
| | | C][mA][fC][mC][mU][ | | mU][mG][mA][mA][mC] |
| | | mU][mG][fA][*mA][*m | | [fU][mG][mU][mU][mU |
| | | A] | | ][mC][*mU][*mU] |
| E11 | 1957 | [mG][mA][fA][mA][mC | 2067 | [vinmU*][fU*][mU][m |
| | | ][mA][fG][fU][fU][m | | C][mA][mA][mG][mG][ |
| | | C][mA][fC][mC][mU][ | | mU][mG][mA][mA][mC] |
| | | mU][mG][fA][*mA][*m | | [fU][mG][mU][mU][mu |
| | | A] | | ][mC][*mU][*mU] |
| F11 | 1958 | [mG][mA][fA][mA][mC | 2068 | [vinmU*][fU*][mU][m |
| | | ][mA][[G][fU][fU][m | | C][mA][mA][mG][mG][ |
| | | C][mA][fC][mC][mU][ | | mU][mG][mA][mA][mC] |
| | | mU][mG][fA][*mA][*m | | [fU][mG][mU][mU][mu |
| | | A] | | ][mC][*mU][*mU] |
| G11 | 1959 | [$][mG][mU][[C][mG] | 2069 | [vinmU*][fC*][mC][m |
| | | [mC][mA][fU][fC][fU | | U][mG][mC][mA][mC][ |
| | | ][mC][mA][fG][mU][m | | mU][mG][mA][mG][mA] |
| | | G][mC][mA][fG][*mG] | | [fU][mG][mC][mG][mA |
| | | [*mA] | | ][mC][*mU][*mU] |
| H11 | 1890 | [mA*][mG*][fA][mA][ | 2290 | [vinmU*][fU*][mC][m |
| | | mA][mC][fA][fG][fU] | | A][mA][mG][mG][mU][ |
| | | [mU][mC][fA][mC][mC | | mG][mA][mA][mC][mU] |
| | | ][mU][mU][fG][mA][m | | [fG][mU][mU][mU][mc |
| | | A] | | ][mU][*mU][*mU] |
| I11 | 1891 | [mG*][mA*][fA][mA][ | 2291 | [vinmU*][fU*][mU][m |
| | | mC][mA][fG][fU][fU] | | C][mA][mA][mG][mG][ |
| | | [mC][mA][fC][mC][mU | | mU][mG][mA][mA][mC] |
| | | ][mU][mG][fA][mA][m | | [fU][mG][mU][mU][mu |
| | | A] | | ][mC][*mU][*mU] |
| J11 | 1892 | [mA*][mA*][fC][mC][ | 2292 | [vinmU*][fA*][mG][m |
| | | mU][mC][fU][fC][fA] | | G][mG][mU][mG][mA][ |
| | | [mC][mU][fU][mC][mA | | mA][mG][mU][mG][mA] |
| | | ][mC][mC][fC][mU][m | | [fG][mA][mG][mG][mU |
| | | A] | | ][mU][*mU][*mU] |
| K11 | 1893 | [mA*][mC*][fC][mU][ | 2293 | [vinmU*][fC*][mA][m |
| | | mC][mU][fC][fA][fC] | | G][mG][mG][mU][mG][ |
| | | [mU][mU][fC][mA][mC | | mA][mA][mG][mU][mG] |
| | | ][mC][mC][fU][mG][m | | [fA][mG][mA][mG][mG |
| | | A] | | ][mU][*mU][*mU] |
| L11 | 1894 | [mC*][mC*][fU][mC][ | 2294 | [vinmU*][fC*][mC][m |
| | | mU][mC][fA][fC][fu] | | A][mG][mG][mG][mU][ |
| | | [mU][mC][fA][mC][mC | | mG][mA][mA][mG][mU] |
| | | ][mC][mU][fG][mG][m | | [fG][mA][mG][mA][mG |
| | | A] | | ][mG][*mU][*mU] |
| M11 | 1895 | [mC*][mU*][fC][mU][ | 2295 | [vinmU*][fU*][mC][m |
| | | mC][mA][fC][fU][fU] | | C][mA][mG][mG][mG][ |
| | | [mC][mA][fC][mC][mC | | mU][mG][mA][mA][mG] |
| | | ][mU][mG][fG][mA][m | | [fU][mG][mA][mG][mA |
| | | A] | | ][mG][*mU][*mU] |
| N11 | 1896 | [mU*][mC*][fU][mC][ | 2296 | [vinmU*][fC*][mU][m |
| | | mA][mC][fU][fU][fC] | | C][mC][mA][mG][mG][ |
| | | [mA][mC][fC][mC][mU | | mG][mU][mG][mA][mA] |
| | | ][mG][mG][fA][mG][m | | [fG][mU][mG][mA][mG |
| | | A] | | ][mA][*mU][*mU] |
| O11 | 1897 | [mC*][mU*][fC][mA][ | 2297 | [vinmU*][fG*][mC][m |
| | | mC][mU][fU][fC][[A] | | U][mC][mC][mA][mG][ |
| | | [mC][mC][fC][mU][mG | | mG][mG][mU][mG][mA] |
| | | ][mG][mA][fG][mC][m | | [fA][mG][mU][mG][mA |
| | | A] | | ][mG][*mU][*mU] |
| P11 | 2298 | [mA*][mG*][fG][mA][ | 2299 | [vinmU*][fU*][mU][m |
| | | mG][mA][fC][fU][fG] | | A][mU][mU][mU][mA][ |
| | | [mG][mC][fU][mA][mA | | mG][mC][mC][mA][mG] |
| | | ][mA][mU][fA][mA][m | | [fU][mC][mU][mC][mC |
| | | A] | | ][mU][*mU][*mU] |
| Q11 | 2302 | [fG*][mU*][fC][mG][ | 2303 | [vinmU*][fC*][mC][f |
| | | fC][mA][fU][[C][fU] | | U][mG][fC][fA][fC][ |
| | | [mC][fA][mG][mU][mG | | mU][fG][mA][mG][mA] |
| | | ][fC][mA][fG][mG][m | | [fU][mG][fC][mG][fA |
| | | A] | | ][mC][*fU][*mU] |
| R11 | 2304 | [fG*][mU*][fC][mG][ | 2305 | [vinmU*][fC*][mC][f |
| | | fC][mA][fU][mC][fU] | | U][mG][fC][mA][fc][ |
| | | [mC][fA][mG][fU][mG | | mU][fG][mA][fG][mA] |
| | | ][fC][mA][fG][mG][f | | [fU][mG][fC][mG][fA |
| | | A] | | ][mC][*mU][*mU] |

Abbreviations Key:
n/N = any nucleotide
mN = 2′-O-Methyl substitution
fN = 2′-F substitution
idT = inverted Dt
vinmN or vinmU = 2′-O methyl vinyl phosphonate uridine
* = phosphorothioate
Nr = Nucleotides A, C, G, U with 2′-OH ribose sugar
[PO] = Phosphate group (PO4)
[$] = PO₄-C₆-NH₂-Palmitate
The brackets indicate the individual bases.

TABLE 4B
siRNA Sense and Antisense Sequences (Unmodified)

| SEQ | | SEQ | |
|---|---|---|---|
| ID NO: | Sense Strand 5′-3′ | ID NO: | Antisense Strand 5′-3′ |
| 939 | GAGUCGCAUCUCAGUGCAA | 959 | UUGCACUGAGAUGCGACUC |
| | | | UU |
| 940 | GUCGCAUCUCAGUGCAGGA | 960 | UCCUGCACUGAGAUGCGAC |
| | | | UU |
| 941 | AGAACCUCUCACUUCACCA | 961 | UGGUGAAGUGAGAGGUUCU |
| | | | UU |
| 942 | GAACCUCUCACUUCACCCA | 962 | UGGGUGAAGUGAGAGGUUC |
| | | | UU |
| 943 | AGUCUCCCAACUUGUAUUA | 963 | UAAUACAAGUUGGGAGACU |
| | | | UU |
| 944 | GGAAGCUGCUUAACUGUCA | 964 | UGACAGUUAAGCAGCUUCC |
| | | | UU |
| 945 | GCAGGAGACUGGCUAAAUA | 965 | UAUUUAGCCAGUCUCCUGC |
| | | | UU |
| 946 | UUAUCCUUUGGUUUCUUGA | 966 | UCAAGAAACCAAAGGAUAA |
| | | | UU |
| 947 | GUGUGUUACGUGCAGUGAA | 967 | UUCACUGCACGUAACACAC |
| | UU | | UG |
| 948 | UGUUCCACUGGGCUGAGAA | 968 | UUCUCAGCCCAGUGGAACA |
| | | | UU |
| 949 | GCGAAUUCCUAGACACCUA | 969 | UAGGUGUCUCGGAAUUCGC |
| | UU | | UU |
| 950 | GUGUGUUACGUGCAGUGAC | 970 | UAGUCACUGCACGUAACAC |
| | UA | | ACUG |
| 951 | ACUACAAGACUCGUGACCA | 971 | UGGUCACGAGUCUUGUAGU |
| | UU | | UU |
| 952 | GUGUGUUACGUGCAGUGAA | 972 | UUCACUGCACGUAACACAC |
| | UU | | UG |
| 953 | GCGAAUUCCUAGACACCUA | 973 | UAGGUGUCUCGGAAUUCGC |
| | UU | | UU |
| 954 | GUGUGUUACGUGCAGUGAC | 974 | UAGUCACUGCACGUAACAC |
| | UA | | ACUG |
| 955 | UCCUUGCGGUGAAAGCGAA | 975 | UUCGCUUUCACCGCAAGGA |
| | | | UU |
| 956 | GUAAUAUCCACCAGACCUA | 976 | UAGGUCUGGUGGAUAUUAC |
| | | | UU |
| 957 | UUGUUUGUGAUAGUGAACA | 977 | UGUUCACUAUCACAAACAA |
| | | | UU |
| 958 | GCUGCUUAACUGUCCAUCA | 978 | UGAUGGACAGUUAAGCAGC |
| | | | UU |
| 2070 | AGCAGGAGACUGGCUAAAA | 2180 | UUUUAGCCAGUCUCCUGCU |
| | | | UU |
| 2071 | CAGGAGACUGGCUAAAUAA | 2181 | UUAUUUAGCCAGUCUCCUG |
| | | | UU |
| 2110 | AGAAACAGUUCACCUUGAA | 2220 | UUCAAGGUGAACUGUUUCU |
| | | | UU |
| 2111 | GAAACAGUUCACCUUGAAA | 2221 | UUUCAAGGUGAACUGUUUC |
| | | | UU |
| 2112 | AACCUCUCACUUCACCCUA | 2222 | UAGGGUGAAGUGAGAGGUU |
| | | | UU |
| 2113 | ACCUCUCACUUCACCCUGA | 2223 | UCAGGGUGAAGUGAGAGGU |
| | | | UU |
| 2114 | CCUCUCACUUCACCCUGGA | 2224 | UCCAGGGUGAAGUGAGAGG |
| | | | UU |
| 2115 | CUCUCACUUCACCCUGGAA | 2225 | UUCCAGGGUGAAGUGAGAG |
| | | | UU |
| 2116 | UCUCACUUCACCCUGGAGA | 2226 | UCUCCAGGGUGAAGUGAGA |
| | | | UU |
| 2117 | CUCACUUCACCCUGGAGCA | 2227 | UGCUCCAGGGUGAAGUGAG |
| | | | UU |
| 2118 | UCACUUCACCCUGGAGCCA | 2228 | UGGCUCCAGGGUGAAGUGA |
| | | | UU |
| 2119 | CACUUCACCCUGGAGCCCA | 2229 | UGGGCUCCAGGGUGAAGUG |
| | | | UU |
| 2120 | ACUUCACCCUGGAGCCCAA | 2230 | UUGGGCUCCAGGGUGAAGU |
| | | | UU |
| 2121 | CUUCACCCUGGAGCCCAUA | 2231 | UAUGGGCUCCAGGGUGAAG |
| | | | UU |
| 2122 | UUCACCCUGGAGCCCAUCA | 2232 | UGAUGGGCUCCAGGGUGAA |
| | | | UU |
| 2123 | UCACCCUGGAGCCCAUCCA | 2233 | UGGAUGGGCUCCAGGGUGA |
| | | | UU |
| 2124 | CACCCUGGAGCCCAUCCAA | 2234 | UUGGAUGGGCUCCAGGGUG |
| | | | UU |
| 2125 | ACCCUGGAGCCCAUCCAGA | 2235 | UCUGGAUGGGCUCCAGGGU |
| | | | UU |
| 2126 | CCCUGGAGCCCAUCCAGUA | 2236 | UACUGGAUGGGCUCCAGGG |
| | | | UU |
| 2127 | CCUGGAGCCCAUCCAGUCA | 2237 | UGACUGGAUGGGCUCCAGG |
| | | | UU |
| 2128 | CUGGAGCCCAUCCAGUCUA | 2238 | UAGACUGGAUGGGCUCCAG |
| | | | UU |
| 2129 | CUGCUUAACUGUCCAUCAA | 2239 | UUGAUGGACAGUUAAGCAG |
| | | | UU |
| 2130 | UGCUUAACUGUCCAUCAGA | 2240 | UCUGAUGGACAGUUAAGCA |
| | | | UU |
| 2131 | GCUUAACUGUCCAUCAGCA | 2241 | UGCUGAUGGACAGUUAAGC |
| | | | UU |
| 2132 | CUUAACUGUCCAUCAGCAA | 2242 | UUGCUGAUGGACAGUUAAG |
| | | | UU |
| 2133 | UUAACUGUCCAUCAGCAGA | 2243 | UCUGCUGAUGGACAGUUAA |
| | | | UU |
| 2134 | AACUGUCCAUCAGCAGGAA | 2244 | UUCCUGCUGAUGGACAGUU |
| | | | UU |
| 2135 | ACUGUCCAUCAGCAGGAGA | 2245 | UCUCCUGCUGAUGGACAGU |
| | | | UU |
| 2136 | CUGUCCAUCAGCAGGAGAA | 2246 | UUCUCCUGCUGAUGGACAG |
| | | | UU |
| 2137 | GUCCAUCAGCAGGAGACUA | 2247 | UAGUCUCCUGCUGAUGGAC |
| | | | UU |
| 2138 | UCCAUCAGCAGGAGACUGA | 2248 | UCAGUCUCCUGCUGAUGGA |
| | | | UU |
| 2139 | AUCAGCAGGAGACUGGCUA | 2249 | UAGCCAGUCUCCUGCUGAU |
| | | | UU |
| 2140 | UCAGCAGGAGACUGGCUAA | 2250 | UUAGCCAGUCUCCUGCUGA |
| | | | UU |
| 2141 | GGAGACUGGCUAAAUAAAA | 2251 | UUUUAUUUAGCCAGUCUCC |
| | | | UU |
| 2142 | GACUGGCUAAAUAAAAUUA | 2252 | UAAUUUUAUUUAGCCAGUC |
| | | | UU |
| 2143 | CUGGCUAAAUAAAAUUAGA | 2253 | UCUAAUUUUAUUUAGCCAG |
| | | | UU |
| 2144 | UGGCUAAAUAAAAUUAGAA | 2254 | UUCUAAUUUUAUUUAGCCA |
| | | | UU |
| 2145 | GGCUAAAUAAAAUUAGAAA | 2255 | UUUCUAAUUUUAUUUAGCC |
| | | | UU |
| 2146 | GCUAAAUAAAAUUAGAAUA | 2256 | UAUUCUAAUUUUAUUUAGC |
| | | | UU |
| 2147 | AAAUAAAAUUAGAAUAUAA | 2257 | UUAUAUUCUAAUUUUAUUU |
| | | | UU |
| 2148 | AUAAAAUUAGAAUAUAUUA | 2258 | UAAUAUAUUCUAAUUUUAU |
| | | | UU |
| 2152 | GAGUCGCAUCUCAGUGCAA | 2262 | UUGCACUGAGAUGCGACUC |
| | | | UU |
| 2153 | GUCGCAUCUCAGUGCAGGA | 2263 | UCCUGCACUGAGAUGCGAC |
| | | | UU |
| 2154 | AGAACCUCUCACUUCACCA | 2264 | UGGUGAAGUGAGAGGUUCU |
| | | | UU |
| 2155 | GCAGGAGACUGGCUAAAUA | 2265 | UAUUUAGCCAGUCUCCUGC |
| | | | UU |
| 2156 | AACAGUACCUAAUAAACAA | 2266 | UUGUUUAUUAGGUACUGUU |
| | | | UU |
| 2157 | GUCGCAUCUCAGUGCAGGA | 2267 | UCCUGCACUGAGAUGCGAC |
| | | | UU |
| 2158 | GUCGCAUCUCAGUGCAGGA | 2268 | UCCUGCACUGAGAUGCGAC |
| | | | UU |
| 2159 | GAACCUCUCACUUCACCCA | 2269 | UGGGUGAAGUGAGAGGUUC |
| | | | UU |
| 2160 | GCAGGAGACUGGCUAAAUA | 2270 | UAUUUAGCCAGUCUCCUGC |
| | | | UU |
| 2161 | AGAAACAGUUCACCUUGAA | 2271 | UUCAAGGUGAACUGUUUCU |
| | | | UU |
| 2162 | GAAACAGUUCACCUUGAAA | 2272 | UUUCAAGGUGAACUGUUUC |
| | | | UU |
| 2163 | GAAACAGUUCACCUUGAAA | 2273 | UUUCAAGGUGAACUGUUUC |
| | | | UU |
| 2164 | ACCUCUCACUUCACCCUGA | 2274 | UCAGGGUGAAGUGAGAGGU |
| | | | UU |
| 2165 | ACUUCACCCUGGAGCCCAA | 2275 | UUGGGCUCCAGGGUGAAGU |
| | | | UU |
| 2166 | GAAACAGUUCACCUUGAAA | 2276 | UUUCAAGGUGAACUGUUUC |
| | | | UU |
| 2167 | GUCGCAUCUCAGUGCAGGA | 2277 | UCCUGCACUGAGAUGCGAC |
| | | | UU |
| 2168 | GUCGCAUCUCAGUGCAGGA | 2278 | UCCUGCACUGAGAUGCGAC |
| | | | UU |
| 2169 | GUCGCAUCUCAGUGCAGGA | 2279 | UCCUGCACUGAGAUGCGAC |
| | | | UU |
| 2170 | GUCGCAUCUCAGUGCAGGA | 2280 | UCCUGCACUGAGAUGCGAC |
| | | | UU |
| 2171 | GUCGCAUCUCAGUGCAGGA | 2281 | UCCUGCACUGAGAUGCGAC |
| | | | UU |
| 2172 | GUCGCAUCUCAGUGCAGGA | 2282 | UCCUGCACUGAGAUGCGAC |
| | | | UU |
| 2173 | GUCGCAUCUCAGUGCAGGA | 2283 | UCCUGCACUGAGAUGCGAC |
| | | | UU |
| 2174 | GAAACAGUUCACCUUGAAA | 2284 | UUUCAAGGUGAACUGUUUC |
| | | | UU |
| 2175 | GAAACAGUUCACCUUGAAA | 2285 | UUUCAAGGUGAACUGUUUC |
| | | | UU |
| 2176 | GAAACAGUUCACCUUGAAA | 2286 | UUUCAAGGUGAACUGUUUC |
| | | | UU |
| 2177 | GAAACAGUUCACCUUGAAA | 2287 | UUUCAAGGUGAACUGUUUC |
| | | | UU |
| 2178 | GAAACAGUUCACCUUGAAA | 2288 | UUUCAAGGUGAACUGUUUC |
| | | | UU |
| 2179 | GUCGCAUCUCAGUGCAGGA | 2289 | UCCUGCACUGAGAUGCGAC |
| | | | UU |
| 2110 | AGAAACAGUUCACCUUGAA | 2220 | UUCAAGGUGAACUGUUUCU |
| | | | UU |
| 2111 | GAAACAGUUCACCUUGAAA | 2221 | UUUCAAGGUGAACUGUUUC |
| | | | UU |
| 2112 | AACCUCUCACUUCACCCUA | 2222 | UAGGGUGAAGUGAGAGGUU |
| | | | UU |
| 2113 | ACCUCUCACUUCACCCUGA | 2223 | UCAGGGUGAAGUGAGAGGU |
| | | | UU |
| 2114 | CCUCUCACUUCACCCUGGA | 2224 | UCCAGGGUGAAGUGAGAGG |
| | | | UU |
| 2115 | CUCUCACUUCACCCUGGAA | 2225 | UUCCAGGGUGAAGUGAGAG |
| | | | UU |
| 2116 | UCUCACUUCACCCUGGAGA | 2226 | UCUCCAGGGUGAAGUGAGA |
| | | | UU |
| 2117 | CUCACUUCACCCUGGAGCA | 2227 | UGCUCCAGGGUGAAGUGAG |
| | | | UU |
| 2300 | AGGAGACUGGCUAAAUAAA | 2301 | UUUAUUUAGCCAGUCUCCU |
| | | | UU |
| 2306 | GUCGCAUCUCAGUGCAGGA | 2307 | UCCUGCACUGAGAUGCGAC |
| | | | UU |
| 2308 | GUCGCAUCUCAGUGCAGGA | 2309 | UCCUGCACUGAGAUGCGAC |
| | | | UU |

TABLE 5A
siRNA Pairs with Linkers

| siRNA | SEQ | | SEQ | |
|---|---|---|---|---|
| Pair | ID NO: | Sense Strand 5′-3′ | ID NO: | Antisense Strand 5′-3′ |
| X6 | 312 | [mG*] [mA*] [fG] [mU] [mC] | 332 | [vinmU*] [fU*] [mG] [mC] |
| | | [mG] [fC] [fA] [fU] [mC] | | [mA] [mC] [mU] [mG] [mA] |
| | | [mU] [fC] [mA] [mG] [mU] | | [mG] [mA] [mU] [mG] [fC] |
| | | [mG] [fC] [mA] [mA] | | [mG] [mA] [mC] [mU] [mC] |
| | | | | [*mU] [*mU] |
| Y6 | 313 | [mG*] [mU*] [fC] [mG] [mC] | 333 | [vinmU*] [fC*] [mC] [mU] |
| | | [mA] [fU] [fC] [fU] [mC] | | [mG] [mC] [mA] [mC] [mU] |
| | | [mA] [fG] [mU] [mG] [mC] | | [mG] [mA] [mG] [mA] [fU] |
| | | [mA] [fG] [mG] [mA] | | [mG] [mC] [mG] [mA] [mC] |
| | | | | [*mU] [*mU] |
| Z6 | 314 | [mA*] [mG*] [fA] [mA] [mC] | 334 | [vinmu*] [fG*] [mG] [mU] |
| | | [mC] [fU] [fC] [fU] [mC] | | [mG] [mA] [mA] [mG] [mU] |
| | | [mA] [fC] [mU] [mU] [mC] | | [mG] [mA] [mG] [mA] [fG] |
| | | [mA] [fC] [mC] [mA] | | [mG] [mU] [mU] [mC] [mu] |
| | | | | [*mU] [*mU] |
| A7 | 318 | [mG*] [mC*] [fA] [mG] [mG] | 338 | [vinmu*] [fA*] [mU] [mU] |
| | | [mA] [fG] [fA] [fC] [mU] | | [mU] [mA] [mG] [mC] [mC] |
| | | [mG] [fG] [mC] [mU] [mA] | | [mA] [mG] [mU] [mC] [fU] |
| | | [mA] [fA] [mU] [mA] | | [mC] [mC] [mU] [mG] [mC] |
| | | | | [*mU] [*mU] |

wherein the sense strands in Table 5A comprise the following 3′ linker: [chemical structure]
Abbreviations Key:
n/N = any nucleotide
mN = 2′-O-Methyl substitution
fN = 2′-F substitution
idT = inverted Dt
vinmN or vinmU = 2′-O methyl vinyl phosphonate uridine
X = O or S
* = phosphorothioate
The brackets indicate the individual bases.

TABLE 5B
siRNA Pairs with Linkers

| SiRNA | SEQ | | SEQ | | Linker |
|---|---|---|---|---|---|
| Pair | ID NO: | Sense Strand 5′-3′ | ID NO: | Antisense Strand 5′-3′ | Location |
| H11 | 1890 | [mA*] [mG*] [fA] | 2290 | [vinmU*] [fU*] [mC] | 3′ end of |
| | | [mA] [mA] [mC] [fA] | | [mA] [mA] [mG] [mG] | sense |
| | | [fG] [fU] [mU] [mC] | | [mU] [mG] [mA] | strand |
| | | [fA] [mC] [mC] [mU] | | [mA] [mC] [mU] [fG] | |
| | | [mU] [fG] [mA] [mA] | | [mU] [mU] [mU] [mC] | |
| | | | | [mU] [*mU] [*mU] | |
| K11 | 1893 | [mA*] [mC*] [fC] | 2293 | [vinmU*] [fC*] [mA] | 3′ end of |
| | | [mU] [mC] [mu] [fC] | | [mG] [mG] [mG] [mU] | sense |
| | | [fA] [fC] [mU] [mu] | | [mG] [mA] [mA] | strand |
| | | [fC] [mA] [mC] [mC] | | [mG] [mU] [mG] [fA] | |
| | | [mC] [fU] [mG] [mA] | | [mG] [mA] [mG] [mG] | |
| | | | | [mU] [*mU] [*mU] | |
| O10 | 1941 | [mA] [mG] [fA] [mA] | 2051 | [vinmU*] [fU*] [mC] | 5′ end of |
| | | [mA] [mC] [fA] [fG] | | [mA] [mA] [mG] | sense |
| | | [fU] [mU] [mC] [fA] | | [mG] [mU] [mG] [mA] | strand |
| | | [mC] [mC] [mU] [mU] | | [mA] [mC] [mU] [fG] | |
| | | [fG] [*mA] [*mA] | | [mU] [mU] [mU] [mC] | |
| | | | | [mU] [*mU] [*mU] | |
| P10 | 1942 | [mG] [mA] [fA] [mA] | 2052 | [vinmU*] [fU*] [mU] | 5′ end of |
| | | [mC] [mA] [fG] [fU] | | [mC] [mA] [mA] [mG] | sense |
| | | [fU] [mC] [mA] [fC] | | [mG] [mU] [mG] | strand |
| | | [mC] [mU] [mU] [mG] | | [mA] [mA] [mC] [fU] | |
| | | [fA] [*mA] [*mA] | | [mG] [mU] [mU] [mU] | |
| | | | | [mC] [*mU] [*mU] | |
| R10 | 1944 | [mA] [mC] [fC] [mU] | 2054 | [vinmU*] [fC*] [mA] | 5′ end of |
| | | [mC] [mU] [fC] [fA] | | [mG] [mG] [mG] | sense |
| | | [fC] [mU] [mU] [fC] | | [mU] [mG] [mA] [mA] | strand |
| | | [mA] [mC] [mC] [mC] | | [mG] [mU] [mG] [fA] | |
| | | [fU] [*mG] [*mA] | | [mG] [mA] [mG] [mG] | |
| | | | | [mU] [*mU] [*mU] | |

wherein the sense strands in Table 5B comprise the following linker: [chemical structure]
Abbreviations Key:
n/N = any nucleotide
mN = 2′-O-Methyl substitution
fN = 2′-F substitution
idT = inverted Dt
vinmN or vinmU = 2′-O methyl vinyl phosphonate uridine
X = O or S
* = phosphorothioate
The brackets indicate the individual bases.

[0231] In some embodiments, the polynucleotides illustrated above include those that do not include a 2′-O methyl vinyl phosphonate uridine as the 5′ nucleotide on the antisense strand of the siRNA.

[0232] In some embodiments, a polynucleotide is as provided for herein. In some embodiments, the polynucleotide comprises a first strand and a second strand for a portion that comprises a duplex. In some embodiments, the polynucleotide comprises a sense strand and an antisense strand. In some embodiments, the polynucleotide comprises the sequences as illustrated in Table 3A, Table 3B, Table 4A, Table 4B, Table 5A, or Table 5B. In some embodiments, the polynucleotide comprises the sequences as illustrated in Table 3A, Table 4A, or Table 5A, but without the base modifications. In some embodiments, a polynucleotide comprises an siRNA pair as provided herein. In some embodiments, the siRNA pair is not conjugated to an FN3 domain.

[0233] In some embodiments, an oligonucleotide molecule described herein is constructed using chemical synthesis and/or enzymatic ligation reactions using procedures known in the art. For example, an oligonucleotide molecule is chemically synthesized using naturally occurring nucleotides or variously modified nucleotides designed to increase the biological stability of the molecules or to increase the physical stability of the duplex formed between the oligonucleotide molecule and target nucleic acids. Alternatively, the oligonucleotide molecule is produced biologically using an expression vector into which a oligonucleotide molecule has been subcloned in an antisense orientation (i.e., RNA transcribed from the inserted oligonucleotide molecule will be of an antisense orientation to a target polynucleic acid molecule of interest).

[0234] In some embodiments, an oligonucleotide molecule is synthesized via a tandem synthesis methodology, wherein both strands are synthesized as a single contiguous oligonucleotide fragment or strand separated by a cleavable linker which is subsequently cleaved to provide separate fragments or strands that hybridize and permit purification of the duplex.

[0235] In some instances, an oligonucleotide molecule is also assembled from two distinct nucleic acid strands or fragments wherein one fragment includes the sense region and the second fragment includes the antisense region of the molecule.

[0236] In some instances, while chemical modification of the oligonucleotide molecule internucleotide linkages with phosphorothioate, phosphorodithioate, phosphonate, phosphoramidate, or mesyl phosphoramidate, linkages improves stability. Excessive modifications sometimes cause toxicity or decreased activity. Therefore, when designing nucleic acid molecules, the amount of these internucleotide linkages in some cases is minimized. In such cases, the reduction in the concentration of these linkages lowers toxicity, increases efficacy and higher specificity of these molecules.

[0237] As described herein, in some embodiments, any nucleic acid molecule disclosed herein can be modified to include a linker at the 5′ end of the of the sense strand of the dsRNA. In some embodiments, any nucleic acid molecules disclosed herein can be modified to include a vinyl phosphonate or modified vinyl phosphonate at the 5′ end of the antisense strand of the dsRNA. In some embodiments, any nucleic acid molecule disclosed herein can be modified to include a linker at the 3′ end of the of the sense strand of the dsRNA. In some embodiments, any nucleic acid molecule disclosed herein can be modified to include a vinyl phosphonate at the 3′ end of the antisense strand of the dsRNA. The linker can be used to link the dsRNA to the FN3 domain. The linker can covalently attach, for example, to a cysteine residue on the FN3 domain that is there naturally or that has been substituted as described herein, and for example, in U.S. Pat. No. 10,196,446, which is hereby incorporated by reference in its entirety.

[0238] In some embodiments, the siRNA pairs of A1-W6 and B₇-G11 as shown in Tables 3A and 4A provided for above comprise a linker at the 3′ end of the sense strand. In some embodiments, the siRNA pairs of A1-W6 and B₇-G11 as shown in Tables 3A and 4A provided for above comprise a vinyl phosphonate at the 5′ end of the sense strand.

[0239] Non-limiting examples of structures of linkers (L) are illustrated in Table 6A and Table 6B, below.

TABLE 6A
Exemplary Linker (L) Structures

| Linker Structure | Linker Name |
|---|---|
| [chemical structure] | Mal-C₂H₄C(O)(NH)- (CH₂)₆ or C₆-NH₂- Propyl-Mal |
| [chemical structure] | Mal- (PEG)₁₂(NH)(CH₂)₆ |
| [chemical structure] | Mal-NH-(CH₂)₆ or Aminohexyl linker- (CH₂)₆- |
| [chemical structure] | Val-Cit-PABA |

TABLE 6B
Exemplary Linker (L) Structures
Linker structures: [chemical structure]
C6-NH2 [chemical structure]
C6-NH2-Propyl-Mal [chemical structure]
C3-NH2-Propyl-Mal [chemical structure]
C3-NH2-Butyryl-Mal [chemical structure]
C3-NH2-Hexyl-Mal [chemical structure]
PEG2-NH2-Propyl-Mal [chemical structure]
C3-NH2-Cyclohexyl-Mal [chemical structure]
5′-C6-NH2-Palmitate

[0240] Other linkers can also be used, such as linkers formed with click chemistry, amide coupling, reductive amination, oxime, and enzymatic couplings such as transglutaminase and sortage conjugations. The linkers provided here are exemplary in nature and other linkers made with other such methods can also be used. For example, linkers connected through phosphate groups can be phosphorothioates or phosphorodithioates.

[0241] When connected to the siRNA, the structures, L-(X₄) can be represented by one of the following formulas:

[chemical structure]

[0242] Although certain siRNA sequences are illustrated herein with certain modified nucleobases, the sequences without such modifications are also provided herein. That is, the sequence can comprise the sequences illustrated in the tables provided herein without any modifications. The unmodified siRNA sequences can still comprise, in some embodiments, a linker at the 5′ end of the of the sense strand of the dsRNA. In some embodiments, the nucleic acid molecules can be modified to include a vinyl phosphonate at the 5′ end of the of the antisense strand of the dsRNA. In some embodiments, the nucleic acid molecule can be modified to include a linker at the 3′ end of the of the sense strand of the dsRNA. In some embodiments, the nucleic acid molecule can be modified to include a vinyl phosphonate at the 3′ end of the of the antisense strand of the dsRNA. The linker can be as provided herein.

[0243] In some embodiments, the FN3 proteins comprising a polypeptide that binds CD71 are provided. In some embodiments, the polypeptide comprises an FN3 domain that binds to CD71. In some embodiments, the polypeptide comprises an amino acid sequence of SEQ ID NOs: 360-644, 663-672, or 1395-1849 are provided. In some embodiments, the polypeptide that binds CD71 comprises a sequence of SEQ ID NOs: 360-644, 663-672, or 1395-1849. The sequence of CD71 protein that the polypeptides can bind to can be, for example, SEQ ID Nos: 3 or 4. In some embodiments, the FN3 domain that binds to CD71 specifically binds to CD71.

[0244] In some embodiments, the FN3 domain that binds CD71 is based on Tencon sequence of SEQ ID NO: 1 or Tencon 27 sequence of SEQ ID NO: 2 (LPAPKNLVVSRVTEDSARLSWTAPDAAFDSFLIQYQESEKVGEAIVLTVPGSERSYD LTGLKPGTEYTVSIYGVKGGHRSNPLSAIFTT), optionally having substitutions at residues positions 11, 14, 17, 37, 46, 73, or 86 (residue numbering corresponding to SEQ ID NO: 2).

[0245] In some embodiments, an isolated FN3 domain that binds CD71 comprises the amino acid sequence of SEQ ID NOs: 360-644, 663-672, or 1395-1849.

[0246] In some embodiments, proteins comprising a polypeptide comprising an amino acid sequence of SEQ ID NO: 360 are provided. SEQ ID NO: 360 is a consensus sequence based on the sequences of SEQ ID NO: 361, SEQ ID NO: 362, SEQ ID NO: 363, and SEQ ID NO: 364. The sequence of SEQ ID NO: 360 is:

MLPAPKNLVVSRVTEDSARLSWTAPDAAFDSFX₁IX₂YX₃EX₄X₅X₆X₇GE
AIX₈LX₉VPGSERSYDLTGLKPGTEYX₁₀VX₁₁IX₁₂X₁₃VKGGX₁₄X₁₅SX₁₆P
LX₁₇AX₁₈FTT,

[0247] wherein X₈, X₉, X₁₇, and X₁₈ are each, independently, any amino acid other than methionine or proline, and
[0248] X₁ is selected from D, F, Y, or H,
[0249] X₂ is selected from Y, G, A, or V,
[0250] X₃ is selected from I, T, L, A, or H,
[0251] X₄ is selected from S, Y or P,
[0252] X₅ is selected from Y, G, Q, or R,
[0253] X₆ is selected from G or P,
[0254] X₇ is selected from A, Y, P, D, or S,
[0255] X₁₀ is selected from W, N, S, or E,
[0256] X₁₁ is selected from L, Y, or G,
[0257] X₁₂ is selected from D, Q, H, or V,
[0258] X₁₃ is selected from G or S,
[0259] X₁₄ is selected from R, G, F, L, or D,
[0260] X₁₅ is selected from W, S, P, or L, and
[0261] X₁₆ is selected from T, V, M, or S.

[0262] In some embodiments:
[0263] X₁ is selected from D, F, Y, or H,
[0264] X₂ is selected from G, A, or V,
[0265] X₃ is selected from T, L, A, or H,
[0266] X₄ is selected from Y or P,
[0267] X₅ is selected from G, Q, or R,
[0268] X₆ is selected from G or P,
[0269] X₇ is selected from Y, P, D, or S,
[0270] X₁₀ is selected from W, N, S, or E,
[0271] X₁₁ is selected from L, Y, or G,
[0272] X₁₂ is selected from Q, H, or V,
[0273] X₁₃ is selected from G or S,
[0274] X₁₄ is selected from G, F, L, or D,
[0275] X₁₅ is selected from S, P, or L, and
[0276] X₁₆ is selected from V, M, or S.

[0277] In some embodiments, X₁, X₂, X₃, X₄, X₅, X₆, X₇, X₁₀, X₁₁, X₁₂, X₁₃, X₁₄, X₁₅, and X₁₆ are as shown in the sequence of SEQ ID NO: 361. In some embodiments, X₁, X₂, X₃, X₄, X₅, X₆, X₇, X₁₀, X₁₁, X₁₂, X₁₃, X₁₄, X₁₅, and X₁₆ are as shown in the sequence of SEQ ID NO: 362. In some embodiments, X₁, X₂, X₃, X₄, X₅, X₆, X₇, X₁₀, X₁₁, X₁₂, X₁₃, X₁₄, X₁₅, and X₁₆ are as shown in the sequence of SEQ ID NO: 363. In some embodiments, X₁, X₂, X₃, X₄, X₅, X₆, X₇, X₁₀, X₁₁, X₁₂, X₁₃, X₁₄, X₁₅, and X₁₆ are as shown in the sequence of SEQ ID NO: 364.

[0278] In some embodiments, X₈, X₉, X₁₇, and X₁₈ is, independently, alanine, arginine, asparagine, aspartic acid, cysteine, glutamine, glutamic acid, glycine, histidine, isoleucine, leucine, lysine, phenylalanine, serine, threonine, tryptophan, tyrosine, or valine. In some embodiments, X₈, X₉, X₁₇, and X₁₈ is, independently, not alanine, arginine, asparagine, aspartic acid, cysteine, glutamine, glutamic acid, glycine, histidine, isoleucine, leucine, lysine, phenylalanine, serine, threonine, tryptophan, tyrosine, or valine. In some embodiments, X₈, X₉, X₁₇, and X₁₈ is, independently, alanine. In some embodiments, X₈, X₉, X₁₇, and X₁₈ is, independently, arginine. In some embodiments, X₈, X₉, X₁₇, and X₁₈ is, independently asparagine. In some embodiments, X₈, X₉, X₁₇, and X₁₈ is, independently, aspartic acid. In some embodiments, X₈, X₉, X₁₇, and X₁₈ is, independently, cysteine. In some embodiments, X₈, X₉, X₁₇, and X₁₈ is, independently, glutamine. In some embodiments, X_{S}, X₉, X₁₇, and X₁₈ is, independently, glutamic acid. In some embodiments, X₈, X₉, X₁₇, and X₁₈ is, independently, glycine. In some embodiments, X₈, X₉, X₁₇, and X₁₈ is, independently, histidine. In some embodiments, X₈, X₉, X₁₇, and X₁₈ is, independently, isoleucine. In some embodiments, X₈, X₉, X₁₇, and X₁₈ is, independently, leucine. In some embodiments, X₈, X₉, X₁₇, and X₁₈ is, independently, lysine. In some embodiments, X₈, X₉, X₁₇, and X₁₈ is, independently, phenylalanine. In some embodiments, X₈, X₉, X₁₇, and X₁₈ is, independently serine. In some embodiments, X₈, X₉, X₁₇, and X₁₈ is, independently, threonine. In some embodiments, X₈, X₉, X₁₇, and X₁₈ is, independently, tryptophan. In some embodiments, X_{S}, X₉, X₁₇, and X₁₈ is, independently, tyrosine. In some embodiments, X₈, X₉, X₁₇, and X₁ₛ is, independently valine.

[0279] In some embodiments, the sequence is set forth as shown in in the sequence of SEQ ID NO: 361, except that the positions that correspond to the positions of X₈, X₉, X₁₇, and X₁₈ can be any other amino acid residue as set forth above, except that in some embodiments, X₈ is not V, X₉ is not T, X₁₇ is not S, and X₁₈ is not I.

[0280] In some embodiments, the sequence is set forth as shown in in the sequence of SEQ ID NO: 362, except that the positions that correspond to the positions of X₈, X₉, X₁₇, and X₁₈ can be any other amino acid residue as set forth above, except that in some embodiments, X₈ is not V, X₉ is not T, X₁₇ is not S, and X₁₈ is not I.

[0281] In some embodiments, the sequence is set forth as shown in in the sequence of SEQ ID NO: 363, except that the positions that correspond to the positions of X₈, X₉, X₁₇, and X₁₈ can be any other amino acid residue as set forth above, except that in some embodiments, X_{S} is not V, X₉ is not T, X₁₇ is not S, and X₁₈ is not I.

[0282] In some embodiments, the sequence is set forth as shown in in the sequence of SEQ ID NO: 364, except that the positions that correspond to the positions of X₈, X₉, X₁₇, and X₁₈ can be any other amino acid residue as set forth above, except that in some embodiments, X_{S} is not V, X₉ is not T, X₁₇ is not S, and X₁₈ is not I.

[0283] In some embodiments, proteins comprising a polypeptide comprising an amino acid sequence that is at least 62%, 63%, 64%, 65%, 66%, 67%, 68%, 69%, 70%, 71%, 72%, 73%, 74%, 75%, 76%, 77%, 78%, 79%, 80%, 81%, 82%, 83%, 84%, 85%, 86%, 87%, 88%, 89%, 90%, 91%, 92%, 93%, 94%, 95%, 96%, 97%, 98% or 99% identical to a sequence of SEQ ID NO: 360. In some embodiments, the protein is at least 85%, 86%, 87%, 88%, 89%, 90%, 91%, 92%, 93%, 94%, 95%, 96%, 97%, 98% or 99% identical to a sequence of SEQ ID NO: 360. In some embodiments, the protein is at least 90%, 91%, 92%, 93%, 94%, 95%, 96%, 97%, 98% or 99% identical to a sequence of SEQ ID NO: 360. In some embodiments, the protein is at least 95%, 96%, 97%, 98% or 99% identical to a sequence of SEQ ID NO: 360.

[0284] Sequences of SEQ ID NOs: 361-364 are listed in Table 7, below.

TABLE 7
CD71-binding FN3 Domain Sequences

| SEQ ID | |
|---|---|
| NO: | SEQUENCE |
| 361 | MLPAPKNLVVSRVTEDSARLSWTAPDAAFDSFYIAYAEPRPDGEAIVLTVPGS |
| | ERSYDLTGLKPGTEYSVLIHGVKGGLLSSPLSAIFTT |
| 362 | MLPAPKNLVVSRVTEDSARLSWTAPDAAFDSFFIGYLEPQPPGEAIVLTVPGS |
| | ERSYDLTGLKPGTEYNVTIQGVKGGFPSMPLSAIFTT |
| 363 | MLPAPKNLVVSRVTEDSARLSWTAPDAAFDSFHIVYHEPRPSGEAIVLTVPGS |
| | ERSYDLTGLKPGTEYEVGIVSVKGGDLSVPLSAIFTT |
| 364 | MLPAPKNLVVSRVTEDSARLSWTAPDAAFDSFDIGYTEYGGYGEAIVLTVPGS |
| | ERSYDLTGLKPGTEYWVLIQGVKGGGSSVPLSAIFTT |

[0285] Percent identity can be determined using the default parameters to align two sequences using BlastP available through the NCBI website.

[0286] As provided herein, in some embodiments, the FN3 domain that binds to CD71 binds to human mature CD71 or the human mature CD71 extracellular domain. In some embodiments, the human mature CD71 is SEQ ID NO: 3, and the human mature CD71 extracellular binding domain is SEQ ID NO: 4, each of which is provided below in Table 8.

TABLE 8
CD71 Sequences

| SEQ | |
|---|---|
| ID NO: | SEQUENCE |
| 3 | MMDQARSAFSNLFGGEPLSYTRFSLARQVDGDNSHVEMKLAVDEEENADNNTKA |
| | NVTKPKRCSGSICYGTIAVIVFFLIGFMIGYLGYCKGVEPKTECERLAGTESPV |
| | REEPGEDFPAARRLYWDDLKRKLSEKLDSTDFTGTIKLLNENSYVPREAGSQKD |
| | ENLALYVENQFREFKLSKVWRDQHFVKIQVKDSAQNSVIIVDKNGRLVYLVENP |
| | GGYVAYSKAATVTGKLVHANFGTKKDFEDLYTPVNGSIVIVRAGKITFAEKVAN |
| | AESLNAIGVLIYMDQTKFPIVNAELSFFGHAHLGTGDPYTPGFPSENHTQFPPS |
| | RSSGLPNIPVQTISRAAAEKLFGNMEGDCPSDWKTDSTCRMVTSESKNVKLTVS |
| | NVLKEIKILNIFGVIKGFVEPDHYVVVGAQRDAWGPGAAKSGVGTALLLKLAQM |
| | FSDMVLKDGFQPSRSIIFASWSAGDEGSVGATEWLEGYLSSLHLKAFTYINLDK |
| | AVLGTSNFKVSASPLLYTLIEKTMQNVKHPVTGQFLYQDSNWASKVEKLILDNA |
| | AFPFLAYSGIPAVSFCFCEDTDYPYLGTTMDTYKELIERIPELNKVARAAAEVA |
| | GQFVIKLTHDVELNLDYERYNSQLLSFVRDLNQYRADIKEMGLSLQWLYSARGD |
| | FFRATSRLTTDFGNAEKTDRFVMKKLNDRVMRVEYHFLSPYVSPKESPFRHVEW |
| | GSGSHTLPALLENLKLRKQNNGAFNETLERNQLALATWTIQGAANALSGDVWDI |
| | DNEF |
| 4 | CKGVEPKTECERLAGTESPVREEPGEDFPAARRLYWDDLKRKLSEKLDSTDFTG |
| | TIKLLNENSYVPREAGSQKDENLALYVENQFREFKLSKVWRDQHFVKIQVKDSA |
| | QNSVIIVDKNGRLVYLVENPGGYVAYSKAATVTGKLVHANFGTKKDFEDLYTPV |
| | NGSIVIVRAGKITFAEKVANAESLNAIGVLIYMDQTKFPIVNAELSFFGHAHLG |
| | TGDPYTPGFPSFNHTQFPPSRSSGLPNIPVQTISRAAAEKLEGNMEGDCPSDWK |
| | TDSTCRMVTSESKNVKLTVSNVLKEIKILNIFGVIKGFVEPDHYVVVGAQRDAW |
| | GPGAAKSGVGTALLLKLAQMFSDMVLKDGFQPSRSIIFASWSAGDEGSVGATEW |
| | LEGYLSSLHLKAFTYINLDKAVLGTSNFKVSASPLLYTLIEKTMQNVKHPVTGQ |
| | FLYQDSNWASKVEKLTLDNAAFPFLAYSGIPAVSFCFCEDTDYPYLGTTMDTYK |
| | ELIERIPELNKVARAAAEVAGQFVIKLTHDVELNLDYERYNSQLLSFVRDLNQY |
| | RADIKEMGLSLQWLYSARGDFFRATSRLTTDFGNAEKTDRFVMKKLNDRVMRVE |
| | YHFLSPYVSPKESPFRHVFWGSGSHTLPALLENLKLRKQNNGAFNETLERNQLA |
| | LATWTIQGAANALSGDVWDIDNEF |

[0287] As provided herein, the FN3 domains can bind to the CD71 protein. Also provided, even if not explicitly stated, is that the domains can also specifically bind to the CD71 protein. Thus, for example, an FN3 domain that binds to CD71 would also encompass an FN3 domain protein that specifically binds to CD71. These molecules can be used, for example, in therapeutic and diagnostic applications and in imaging. In some embodiments, polynucleotides encoding the FN3 domains disclosed herein or complementary nucleic acids thereof, vectors, host cells, and methods of making and using them are provided. In some embodiments, an isolated FN3 domain that binds or specifically binds CD71 is provided.

[0288] In some embodiments, the FN3 domain may bind CD71 with a dissociation constant (K_{D}) of less than about 1×10⁻⁷ M, for example less than about 1×10⁻⁸ M, less than about 1×10-9 M, less than about 1×10⁻¹⁰ M, less than about 1×10⁻¹ M, less than about 1×10⁻² M, or less than about 1×10⁻³ M as determined by surface plasmon resonance or the Kinexa method, as practiced by those of skill in the art. The measured affinity of a particular FN3 domain-antigen interaction can vary if measured under different conditions (e.g., osmolarity, pH). Thus, measurements of affinity and other antigen-binding parameters (e.g., K_{D}, Kₒₙ, K_{off}) are made with standardized solutions of protein scaffold and antigen, and a standardized buffer, such as the buffers described herein.

[0289] In some embodiments, the FN3 domain may bind CD71 at least 5-fold above the signal obtained for a negative control in a standard solution ELISA assay.

[0290] In some embodiments, the FN3 domain that binds or specifically binds CD71 comprises an initiator methionine (Met) linked to the N-terminus of the molecule. In some embodiments, the FN3 domain that binds or specifically binds CD71 comprises a cysteine (Cys) linked to a C-terminus of the FN3 domain. The addition of the N-terminal Met and/or the C-terminal Cys may facilitate expression and/or conjugation to extend half-life and to provide other functions of molecules.

[0291] The FN3 domain can also contain cysteine substitutions, such as those that are described in U.S. Pat. No. 10,196,446, which is hereby incorporated by reference in its entirety. Briefly, in some embodiments, the polypeptides provided herein can comprise at least one cysteine substitution at a position selected from the group consisting of residues 6, 8, 10, 11, 14, 15, 16, 20, 30, 34, 38, 40, 41, 45, 47, 48, 53, 54, 59, 60, 62, 64, 70, 88, 89, 90, 91, and 93 of the FN3 domain based on SEQ ID NO: 1 or SEQ ID NO: 1 of U.S. Pat. No. 10,196,446

(SEQ ID NO: 2311)
LPAPKNLVVSEVTEDSLRLSWTAPDAAFDSFLIQYQESE
KVGEAINLTVPGSERSYDLTGLKPGTEYTVSIYGVKGGH
RSNPLSAEFTT,

[0292] which is hereby incorporated by reference in its entirety, and the equivalent positions in related FN3 domains.

[0293] In some embodiments, the substitution is at residue 6. In some embodiments, the substitution is at residue 8. In some embodiments, the substitution is at residue 10. In some embodiments, the substitution is at residue 11. In some embodiments, the substitution is at residue 14. In some embodiments, the substitution is at residue 15. In some embodiments, the substitution is at residue 16. In some embodiments, the substitution is at residue 20. In some embodiments, the substitution is at residue 30. In some embodiments, the substitution is at residue 34. In some embodiments, the substitution is at residue 38. In some embodiments, the substitution is at residue 40. In some embodiments, the substitution is at residue 41. In some embodiments, the substitution is at residue 45. In some embodiments, the substitution is at residue 47. In some embodiments, the substitution is at residue 48. In some embodiments, the substitution is at residue 53. In some embodiments, the substitution is at residue 54. In some embodiments, the substitution is at residue 59. In some embodiments, the substitution is at residue 60. In some embodiments, the substitution is at residue 62. In some embodiments, the substitution is at residue 64. In some embodiments, the substitution is at residue 70. In some embodiments, the substitution is at residue 88. In some embodiments, the substitution is at residue 89. In some embodiments, the substitution is at residue 90. In some embodiments, the substitution is at residue 91. In some embodiments, the substitution is at residue 93.

[0294] A cysteine substitution at a position in the domain or protein comprises a replacement of the existing amino acid residue with a cysteine residue. In some embodiments, instead of a substitution a cysteine is inserted into the sequence adjacent to the positions listed above. Other examples of cysteine modifications can be found in, for example, U.S. Patent Application Publication No. 2017/0362301, which is hereby incorporated by reference in its entirety. The alignment of the sequences can be performed using BlastP using the default parameters at, for example, the NCBI website.

[0295] In some embodiments, a cysteine residue is inserted at any position in the domain or protein.

[0296] In some embodiments, the FN3 domain that binds CD71 is internalized into a cell. In some embodiments, internalization of the FN3 domain may facilitate delivery of a detectable label or therapeutic into a cell. In some embodiments, internalization of the FN3 domain may facilitate delivery of a cytotoxic agent into a cell. The cytotoxic agent can act as a therapeutic agent. In some embodiments, internalization of the FN3 domain may facilitate the delivery of any detectable label, therapeutic, and/or cytotoxic agent disclosed herein into a cell. In some embodiments, internalization of the FN3 domain may facilitate delivery of a oligonucleotide into a cell. In some embodiments, the cell is a tumor cell. In some embodiments, the cell is a liver cell. In some embodiments, the cell is a muscle cell. In some embodiments, the cell is an immune cell. In some embodiments, the cell is a cell of the central nervous system. In some embodiments, the cell is a heart cell. In some embodiments, the therapeutic is an siRNA molecule as provided for herein. The FN3 domains that bind CD71 conjugated to a detectable label can be used to evaluate expression of CD71 on samples such as tumor tissue in vivo or in vitro. The FN3 domains that bind CD71 conjugated to a detectable label can be used to evaluate expression of CD71 on samples blood, immune cells, or muscle cells in vivo or in vitro.

[0297] In some embodiments, an isolated FN3 domain that binds CD71 comprises the amino acid sequence of SEQ ID NOs: 360-644, 663-672, or 1395-1849.

[0298] In some embodiments, an isolated FN3 domain that binds CD71 comprises the amino acid sequence of SEQ ID NO: 365. In some embodiments, an isolated FN3 domain that binds CD71 comprises the amino acid sequence of SEQ ID NO: 366. In some embodiments, an isolated FN3 domain that binds CD71 comprises the amino acid sequence of SEQ ID NO: 367. In some embodiments, an isolated FN3 domain that binds CD71 comprises the amino acid sequence of SEQ ID NO: 368. In some embodiments, an isolated FN3 domain that binds CD71 comprises the amino acid sequence of SEQ ID NO: 369. In some embodiments, an isolated FN3 domain that binds CD71 comprises the amino acid sequence of SEQ ID NO: 370. In some embodiments, an isolated FN3 domain that binds CD71 comprises the amino acid sequence of SEQ ID NO: 371. In some embodiments, an isolated FN3 domain that binds CD71 comprises the amino acid sequence of SEQ ID NO: 372. In some embodiments, an isolated FN3 domain that binds CD71 comprises the amino acid sequence of SEQ ID NO: 373. In some embodiments, an isolated FN3 domain that binds CD71 comprises the amino acid sequence of SEQ ID NO: 374. In some embodiments, an isolated FN3 domain that binds CD71 comprises the amino acid sequence of SEQ ID NO: 375. In some embodiments, an isolated FN3 domain that binds CD71 comprises the amino acid sequence of SEQ ID NO: 376. In some embodiments, an isolated FN3 domain that binds CD71 comprises the amino acid sequence of SEQ ID NO: 377. In some embodiments, an isolated FN3 domain that binds CD71 comprises the amino acid sequence of SEQ ID NO: 378. In some embodiments, an isolated FN3 domain that binds CD71 comprises the amino acid sequence of SEQ ID NO: 379. In some embodiments, an isolated FN3 domain that binds CD71 comprises the amino acid sequence of SEQ ID NO: 380. In some embodiments, an isolated FN3 domain that binds CD71 comprises the amino acid sequence of SEQ ID NO: 381. In some embodiments, an isolated FN3 domain that binds CD71 comprises the amino acid sequence of SEQ ID NO: 382. In some embodiments, an isolated FN3 domain that binds CD71 comprises the amino acid sequence of SEQ ID NO: 383. In some embodiments, an isolated FN3 domain that binds CD71 comprises the amino acid sequence of SEQ ID NO: 384. In some embodiments, an isolated FN3 domain that binds CD71 comprises the amino acid sequence of SEQ ID NO: 385. In some embodiments, an isolated FN3 domain that binds CD71 comprises the amino acid sequence of SEQ ID NO: 386. In some embodiments, an isolated FN3 domain that binds CD71 comprises the amino acid sequence of SEQ ID NO: 387. In some embodiments, an isolated FN3 domain that binds CD71 comprises the amino acid sequence of SEQ ID NO: 388. In some embodiments, an isolated FN3 domain that binds CD71 comprises the amino acid sequence of SEQ ID NO: 389. In some embodiments, an isolated FN3 domain that binds CD71 comprises the amino acid sequence of SEQ ID NO: 390. In some embodiments, an isolated FN3 domain that binds CD71 comprises the amino acid sequence of SEQ ID NO: 391. In some embodiments, an isolated FN3 domain that binds CD71 comprises the amino acid sequence of SEQ ID NO: 392. In some embodiments, an isolated FN3 domain that binds CD71 comprises the amino acid sequence of SEQ ID NO: 393. In some embodiments, an isolated FN3 domain that binds CD71 comprises the amino acid sequence of SEQ ID NO: 394. In some embodiments, an isolated FN3 domain that binds CD71 comprises the amino acid sequence of SEQ ID NO: 395. In some embodiments, an isolated FN3 domain that binds CD71 comprises the amino acid sequence of SEQ ID NO: 396. In some embodiments, an isolated FN3 domain that binds CD71 comprises the amino acid sequence of SEQ ID NO: 397. In some embodiments, an isolated FN3 domain that binds CD71 comprises the amino acid sequence of SEQ ID NO: 398. In some embodiments, an isolated FN3 domain that binds CD71 comprises the amino acid sequence of SEQ ID NO: 399. In some embodiments, an isolated FN3 domain that binds CD71 comprises the amino acid sequence of SEQ ID NO: 400. In some embodiments, an isolated FN3 domain that binds CD71 comprises the amino acid sequence of SEQ ID NO: 401. In some embodiments, an isolated FN3 domain that binds CD71 comprises the amino acid sequence of SEQ ID NO: 402. In some embodiments, an isolated FN3 domain that binds CD71 comprises the amino acid sequence of SEQ ID NO: 403. In some embodiments, an isolated FN3 domain that binds CD71 comprises the amino acid sequence of SEQ ID NO: 404. In some embodiments, an isolated FN3 domain that binds CD71 comprises the amino acid sequence of SEQ ID NO: 405. In some embodiments, an isolated FN3 domain that binds CD71 comprises the amino acid sequence of SEQ ID NO: 406. In some embodiments, an isolated FN3 domain that binds CD71 comprises the amino acid sequence of SEQ ID NO: 407. In some embodiments, an isolated FN3 domain that binds CD71 comprises the amino acid sequence of SEQ ID NO: 408. In some embodiments, an isolated FN3 domain that binds CD71 comprises the amino acid sequence of SEQ ID NO: 409. In some embodiments, an isolated FN3 domain that binds CD71 comprises the amino acid sequence of SEQ ID NO: 410. In some embodiments, an isolated FN3 domain that binds CD71 comprises the amino acid sequence of SEQ ID NO: 411. In some embodiments, an isolated FN3 domain that binds CD71 comprises the amino acid sequence of SEQ ID NO: 412. In some embodiments, an isolated FN3 domain that binds CD71 comprises the amino acid sequence of SEQ ID NO: 413. In some embodiments, an isolated FN3 domain that binds CD71 comprises the amino acid sequence of SEQ ID NO: 414. In some embodiments, an isolated FN3 domain that binds CD71 comprises the amino acid sequence of SEQ ID NO: 415. In some embodiments, an isolated FN3 domain that binds CD71 comprises the amino acid sequence of SEQ ID NO: 416. In some embodiments, an isolated FN3 domain that binds CD71 comprises the amino acid sequence of SEQ ID NO: 417. In some embodiments, an isolated FN3 domain that binds CD71 comprises the amino acid sequence of SEQ ID NO: 418. In some embodiments, an isolated FN3 domain that binds CD71 comprises the amino acid sequence of SEQ ID NO: 419. In some embodiments, an isolated FN3 domain that binds CD71 comprises the amino acid sequence of SEQ ID NO: 420. In some embodiments, an isolated FN3 domain that binds CD71 comprises the amino acid sequence of SEQ ID NO: 421. In some embodiments, an isolated FN3 domain that binds CD71 comprises the amino acid sequence of SEQ ID NO: 422. In some embodiments, an isolated FN3 domain that binds CD71 comprises the amino acid sequence of SEQ ID NO: 423. In some embodiments, an isolated FN3 domain that binds CD71 comprises the amino acid sequence of SEQ ID NO: 424. In some embodiments, an isolated FN3 domain that binds CD71 comprises the amino acid sequence of SEQ ID NO: 425. In some embodiments, an isolated FN3 domain that binds CD71 comprises the amino acid sequence of SEQ ID NO: 426. In some embodiments, an isolated FN3 domain that binds CD71 comprises the amino acid sequence of SEQ ID NO: 427. In some embodiments, an isolated FN3 domain that binds CD71 comprises the amino acid sequence of SEQ ID NO: 428. In some embodiments, an isolated FN3 domain that binds CD71 comprises the amino acid sequence of SEQ ID NO: 429. In some embodiments, an isolated FN3 domain that binds CD71 comprises the amino acid sequence of SEQ ID NO: 430. In some embodiments, an isolated FN3 domain that binds CD71 comprises the amino acid sequence of SEQ ID NO: 431. In some embodiments, an isolated FN3 domain that binds CD71 comprises the amino acid sequence of SEQ ID NO: 432. In some embodiments, an isolated FN3 domain that binds CD71 comprises the amino acid sequence of SEQ ID NO: 433. In some embodiments, an isolated FN3 domain that binds CD71 comprises the amino acid sequence of SEQ ID NO: 434. In some embodiments, an isolated FN3 domain that binds CD71 comprises the amino acid sequence of SEQ ID NO: 435. In some embodiments, an isolated FN3 domain that binds CD71 comprises the amino acid sequence of SEQ ID NO: 436. In some embodiments, an isolated FN3 domain that binds CD71 comprises the amino acid sequence of SEQ ID NO: 437. In some embodiments, an isolated FN3 domain that binds CD71 comprises the amino acid sequence of SEQ ID NO: 438. In some embodiments, an isolated FN3 domain that binds CD71 comprises the amino acid sequence of SEQ ID NO: 439. In some embodiments, an isolated FN3 domain that binds CD71 comprises the amino acid sequence of SEQ ID NO: 440. In some embodiments, an isolated FN3 domain that binds CD71 comprises the amino acid sequence of SEQ ID NO: 441. In some embodiments, an isolated FN3 domain that binds CD71 comprises the amino acid sequence of SEQ ID NO: 442. In some embodiments, an isolated FN3 domain that binds CD71 comprises the amino acid sequence of SEQ ID NO: 443. In some embodiments, an isolated FN3 domain that binds CD71 comprises the amino acid sequence of SEQ ID NO: 444. In some embodiments, an isolated FN3 domain that binds CD71 comprises the amino acid sequence of SEQ ID NO: 445. In some embodiments, an isolated FN3 domain that binds CD71 comprises the amino acid sequence of SEQ ID NO: 446. In some embodiments, an isolated FN3 domain that binds CD71 comprises the amino acid sequence of SEQ ID NO: 447. In some embodiments, an isolated FN3 domain that binds CD71 comprises the amino acid sequence of SEQ ID NO: 448. In some embodiments, an isolated FN3 domain that binds CD71 comprises the amino acid sequence of SEQ ID NO: 449. In some embodiments, an isolated FN3 domain that binds CD71 comprises the amino acid sequence of SEQ ID NO: 450. In some embodiments, an isolated FN3 domain that binds CD71 comprises the amino acid sequence of SEQ ID NO: 451. In some embodiments, an isolated FN3 domain that binds CD71 comprises the amino acid sequence of SEQ ID NO: 452. In some embodiments, an isolated FN3 domain that binds CD71 comprises the amino acid sequence of SEQ ID NO: 453. In some embodiments, an isolated FN3 domain that binds CD71 comprises the amino acid sequence of SEQ ID NO: 454. In some embodiments, an isolated FN3 domain that binds CD71 comprises the amino acid sequence of SEQ ID NO: 455. In some embodiments, an isolated FN3 domain that binds CD71 comprises the amino acid sequence of SEQ ID NO: 456. In some embodiments, an isolated FN3 domain that binds CD71 comprises the amino acid sequence of SEQ ID NO: 457. In some embodiments, an isolated FN3 domain that binds CD71 comprises the amino acid sequence of SEQ ID NO: 458. In some embodiments, an isolated FN3 domain that binds CD71 comprises the amino acid sequence of SEQ ID NO: 459. In some embodiments, an isolated FN3 domain that binds CD71 comprises the amino acid sequence of SEQ ID NO: 460. In some embodiments, an isolated FN3 domain that binds CD71 comprises the amino acid sequence of SEQ ID NO: 461. In some embodiments, an isolated FN3 domain that binds CD71 comprises the amino acid sequence of SEQ ID NO: 462. In some embodiments, an isolated FN3 domain that binds CD71 comprises the amino acid sequence of SEQ ID NO: 463. In some embodiments, an isolated FN3 domain that binds CD71 comprises the amino acid sequence of SEQ ID NO: 464. In some embodiments, an isolated FN3 domain that binds CD71 comprises the amino acid sequence of SEQ ID NO: 465. In some embodiments, an isolated FN3 domain that binds CD71 comprises the amino acid sequence of SEQ ID NO: 466. In some embodiments, an isolated FN3 domain that binds CD71 comprises the amino acid sequence of SEQ ID NO: 467. In some embodiments, an isolated FN3 domain that binds CD71 comprises the amino acid sequence of SEQ ID NO: 468. In some embodiments, an isolated FN3 domain that binds CD71 comprises the amino acid sequence of SEQ ID NO: 469. In some embodiments, an isolated FN3 domain that binds CD71 comprises the amino acid sequence of SEQ ID NO: 470. In some embodiments, an isolated FN3 domain that binds CD71 comprises the amino acid sequence of SEQ ID NO: 471. In some embodiments, an isolated FN3 domain that binds CD71 comprises the amino acid sequence of SEQ ID NO: 472. In some embodiments, an isolated FN3 domain that binds CD71 comprises the amino acid sequence of SEQ ID NO: 473. In some embodiments, an isolated FN3 domain that binds CD71 comprises the amino acid sequence of SEQ ID NO: 474. In some embodiments, an isolated FN3 domain that binds CD71 comprises the amino acid sequence of SEQ ID NO: 475. In some embodiments, an isolated FN3 domain that binds CD71 comprises the amino acid sequence of SEQ ID NO: 476. In some embodiments, an isolated FN3 domain that binds CD71 comprises the amino acid sequence of SEQ ID NO: 477. In some embodiments, an isolated FN3 domain that binds CD71 comprises the amino acid sequence of SEQ ID NO: 478. In some embodiments, an isolated FN3 domain that binds CD71 comprises the amino acid sequence of SEQ ID NO: 479. In some embodiments, an isolated FN3 domain that binds CD71 comprises the amino acid sequence of SEQ ID NO: 480. In some embodiments, an isolated FN3 domain that binds CD71 comprises the amino acid sequence of SEQ ID NO: 481. In some embodiments, an isolated FN3 domain that binds CD71 comprises the amino acid sequence of SEQ ID NO: 482. In some embodiments, an isolated FN3 domain that binds CD71 comprises the amino acid sequence of SEQ ID NO: 483. In some embodiments, an isolated FN3 domain that binds CD71 comprises the amino acid sequence of SEQ ID NO: 484. In some embodiments, an isolated FN3 domain that binds CD71 comprises the amino acid sequence of SEQ ID NO: 485. In some embodiments, an isolated FN3 domain that binds CD71 comprises the amino acid sequence of SEQ ID NO: 486. In some embodiments, an isolated FN3 domain that binds CD71 comprises the amino acid sequence of SEQ ID NO: 487. In some embodiments, an isolated FN3 domain that binds CD71 comprises the amino acid sequence of SEQ ID NO: 488. In some embodiments, an isolated FN3 domain that binds CD71 comprises the amino acid sequence of SEQ ID NO: 489. In some embodiments, an isolated FN3 domain that binds CD71 comprises the amino acid sequence of SEQ ID NO: 490. In some embodiments, an isolated FN3 domain that binds CD71 comprises the amino acid sequence of SEQ ID NO: 491. In some embodiments, an isolated FN3 domain that binds CD71 comprises the amino acid sequence of SEQ ID NO: 492. In some embodiments, an isolated FN3 domain that binds CD71 comprises the amino acid sequence of SEQ ID NO: 493. In some embodiments, an isolated FN3 domain that binds CD71 comprises the amino acid sequence of SEQ ID NO: 494. In some embodiments, an isolated FN3 domain that binds CD71 comprises the amino acid sequence of SEQ ID NO: 495. In some embodiments, an isolated FN3 domain that binds CD71 comprises the amino acid sequence of SEQ ID NO: 496. In some embodiments, an isolated FN3 domain that binds CD71 comprises the amino acid sequence of SEQ ID NO: 497. In some embodiments, an isolated FN3 domain that binds CD71 comprises the amino acid sequence of SEQ ID NO: 498. In some embodiments, an isolated FN3 domain that binds CD71 comprises the amino acid sequence of SEQ ID NO: 499. In some embodiments, an isolated FN3 domain that binds CD71 comprises the amino acid sequence of SEQ ID NO: 500. In some embodiments, an isolated FN3 domain that binds CD71 comprises the amino acid sequence of SEQ ID NO: 501. In some embodiments, an isolated FN3 domain that binds CD71 comprises the amino acid sequence of SEQ ID NO: 502. In some embodiments, an isolated FN3 domain that binds CD71 comprises the amino acid sequence of SEQ ID NO: 503. In some embodiments, an isolated FN3 domain that binds CD71 comprises the amino acid sequence of SEQ ID NO: 504. In some embodiments, an isolated FN3 domain that binds CD71 comprises the amino acid sequence of SEQ ID NO: 505. In some embodiments, an isolated FN3 domain that binds CD71 comprises the amino acid sequence of SEQ ID NO: 506. In some embodiments, an isolated FN3 domain that binds CD71 comprises the amino acid sequence of SEQ ID NO: 507. In some embodiments, an isolated FN3 domain that binds CD71 comprises the amino acid sequence of SEQ ID NO: 508. In some embodiments, an isolated FN3 domain that binds CD71 comprises the amino acid sequence of SEQ ID NO: 509. In some embodiments, an isolated FN3 domain that binds CD71 comprises the amino acid sequence of SEQ ID NO: 510. In some embodiments, an isolated FN3 domain that binds CD71 comprises the amino acid sequence of SEQ ID NO: 511. In some embodiments, an isolated FN3 domain that binds CD71 comprises the amino acid sequence of SEQ ID NO: 512. In some embodiments, an isolated FN3 domain that binds CD71 comprises the amino acid sequence of SEQ ID NO: 513. In some embodiments, an isolated FN3 domain that binds CD71 comprises the amino acid sequence of SEQ ID NO: 514. In some embodiments, an isolated FN3 domain that binds CD71 comprises the amino acid sequence of SEQ ID NO: 515. In some embodiments, an isolated FN3 domain that binds CD71 comprises the amino acid sequence of SEQ ID NO: 516. In some embodiments, an isolated FN3 domain that binds CD71 comprises the amino acid sequence of SEQ ID NO: 517. In some embodiments, an isolated FN3 domain that binds CD71 comprises the amino acid sequence of SEQ ID NO: 518. In some embodiments, an isolated FN3 domain that binds CD71 comprises the amino acid sequence of SEQ ID NO: 519. In some embodiments, an isolated FN3 domain that binds CD71 comprises the amino acid sequence of SEQ ID NO: 520. In some embodiments, an isolated FN3 domain that binds CD71 comprises the amino acid sequence of SEQ ID NO: 521. In some embodiments, an isolated FN3 domain that binds CD71 comprises the amino acid sequence of SEQ ID NO: 522. In some embodiments, an isolated FN3 domain that binds CD71 comprises the amino acid sequence of SEQ ID NO: 523. In some embodiments, an isolated FN3 domain that binds CD71 comprises the amino acid sequence of SEQ ID NO: 524. In some embodiments, an isolated FN3 domain that binds CD71 comprises the amino acid sequence of SEQ ID NO: 525. In some embodiments, an isolated FN3 domain that binds CD71 comprises the amino acid sequence of SEQ ID NO: 526. In some embodiments, an isolated FN3 domain that binds CD71 comprises the amino acid sequence of SEQ ID NO: 527. In some embodiments, an isolated FN3 domain that binds CD71 comprises the amino acid sequence of SEQ ID NO: 528. In some embodiments, an isolated FN3 domain that binds CD71 comprises the amino acid sequence of SEQ ID NO: 529. In some embodiments, an isolated FN3 domain that binds CD71 comprises the amino acid sequence of SEQ ID NO: 530. In some embodiments, an isolated FN3 domain that binds CD71 comprises the amino acid sequence of SEQ ID NO: 531. In some embodiments, an isolated FN3 domain that binds CD71 comprises the amino acid sequence of SEQ ID NO: 532. In some embodiments, an isolated FN3 domain that binds CD71 comprises the amino acid sequence of SEQ ID NO: 533. In some embodiments, an isolated FN3 domain that binds CD71 comprises the amino acid sequence of SEQ ID NO: 534. In some embodiments, an isolated FN3 domain that binds CD71 comprises the amino acid sequence of SEQ ID NO: 535. In some embodiments, an isolated FN3 domain that binds CD71 comprises the amino acid sequence of SEQ ID NO: 536. In some embodiments, an isolated FN3 domain that binds CD71 comprises the amino acid sequence of SEQ ID NO: 537. In some embodiments, an isolated FN3 domain that binds CD71 comprises the amino acid sequence of SEQ ID NO: 538. In some embodiments, an isolated FN3 domain that binds CD71 comprises the amino acid sequence of SEQ ID NO: 539. In some embodiments, an isolated FN3 domain that binds CD71 comprises the amino acid sequence of SEQ ID NO: 540. In some embodiments, an isolated FN3 domain that binds CD71 comprises the amino acid sequence of SEQ ID NO: 541. In some embodiments, an isolated FN3 domain that binds CD71 comprises the amino acid sequence of SEQ ID NO: 542. In some embodiments, an isolated FN3 domain that binds CD71 comprises the amino acid sequence of SEQ ID NO: 543. In some embodiments, an isolated FN3 domain that binds CD71 comprises the amino acid sequence of SEQ ID NO: 544. In some embodiments, an isolated FN3 domain that binds CD71 comprises the amino acid sequence of SEQ ID NO: 545. In some embodiments, an isolated FN3 domain that binds CD71 comprises the amino acid sequence of SEQ ID NO: 546. In some embodiments, an isolated FN3 domain that binds CD71 comprises the amino acid sequence of SEQ ID NO: 547. In some embodiments, an isolated FN3 domain that binds CD71 comprises the amino acid sequence of SEQ ID NO: 548. In some embodiments, an isolated FN3 domain that binds CD71 comprises the amino acid sequence of SEQ ID NO: 549. In some embodiments, an isolated FN3 domain that binds CD71 comprises the amino acid sequence of SEQ ID NO: 550. In some embodiments, an isolated FN3 domain that binds CD71 comprises the amino acid sequence of SEQ ID NO: 551. In some embodiments, an isolated FN3 domain that binds CD71 comprises the amino acid sequence of SEQ ID NO: 552. In some embodiments, an isolated FN3 domain that binds CD71 comprises the amino acid sequence of SEQ ID NO: 553. In some embodiments, an isolated FN3 domain that binds CD71 comprises the amino acid sequence of SEQ ID NO: 554. In some embodiments, an isolated FN3 domain that binds CD71 comprises the amino acid sequence of SEQ ID NO: 555. In some embodiments, an isolated FN3 domain that binds CD71 comprises the amino acid sequence of SEQ ID NO: 556. In some embodiments, an isolated FN3 domain that binds CD71 comprises the amino acid sequence of SEQ ID NO: 557. In some embodiments, an isolated FN3 domain that binds CD71 comprises the amino acid sequence of SEQ ID NO: 558. In some embodiments, an isolated FN3 domain that binds CD71 comprises the amino acid sequence of SEQ ID NO: 559. In some embodiments, an isolated FN3 domain that binds CD71 comprises the amino acid sequence of SEQ ID NO: 560. In some embodiments, an isolated FN3 domain that binds CD71 comprises the amino acid sequence of SEQ ID NO: 561. In some embodiments, an isolated FN3 domain that binds CD71 comprises the amino acid sequence of SEQ ID NO: 562. In some embodiments, an isolated FN3 domain that binds CD71 comprises the amino acid sequence of SEQ ID NO: 563. In some embodiments, an isolated FN3 domain that binds CD71 comprises the amino acid sequence of SEQ ID NO: 564. In some embodiments, an isolated FN3 domain that binds CD71 comprises the amino acid sequence of SEQ ID NO: 565. In some embodiments, an isolated FN3 domain that binds CD71 comprises the amino acid sequence of SEQ ID NO: 566. In some embodiments, an isolated FN3 domain that binds CD71 comprises the amino acid sequence of SEQ ID NO: 567. In some embodiments, an isolated FN3 domain that binds CD71 comprises the amino acid sequence of SEQ ID NO: 568. In some embodiments, an isolated FN3 domain that binds CD71 comprises the amino acid sequence of SEQ ID NO: 569. In some embodiments, an isolated FN3 domain that binds CD71 comprises the amino acid sequence of SEQ ID NO: 570. In some embodiments, an isolated FN3 domain that binds CD71 comprises the amino acid sequence of SEQ ID NO: 571. In some embodiments, an isolated FN3 domain that binds CD71 comprises the amino acid sequence of SEQ ID NO: 572. In some embodiments, an isolated FN3 domain that binds CD71 comprises the amino acid sequence of SEQ ID NO: 573. In some embodiments, an isolated FN3 domain that binds CD71 comprises the amino acid sequence of SEQ ID NO: 574. In some embodiments, an isolated FN3 domain that binds CD71 comprises the amino acid sequence of SEQ ID NO: 575. In some embodiments, an isolated FN3 domain that binds CD71 comprises the amino acid sequence of SEQ ID NO: 576. In some embodiments, an isolated FN3 domain that binds CD71 comprises the amino acid sequence of SEQ ID NO: 577. In some embodiments, an isolated FN3 domain that binds CD71 comprises the amino acid sequence of SEQ ID NO: 578. In some embodiments, an isolated FN3 domain that binds CD71 comprises the amino acid sequence of SEQ ID NO: 579. In some embodiments, an isolated FN3 domain that binds CD71 comprises the amino acid sequence of SEQ ID NO: 580. In some embodiments, an isolated FN3 domain that binds CD71 comprises the amino acid sequence of SEQ ID NO: 581. In some embodiments, an isolated FN3 domain that binds CD71 comprises the amino acid sequence of SEQ ID NO: 582. In some embodiments, an isolated FN3 domain that binds CD71 comprises the amino acid sequence of SEQ ID NO: 583. In some embodiments, an isolated FN3 domain that binds CD71 comprises the amino acid sequence of SEQ ID NO: 584. In some embodiments, an isolated FN3 domain that binds CD71 comprises the amino acid sequence of SEQ ID NO: 585. In some embodiments, an isolated FN3 domain that binds CD71 comprises the amino acid sequence of SEQ ID NO: 586. In some embodiments, an isolated FN3 domain that binds CD71 comprises the amino acid sequence of SEQ ID NO: 587. In some embodiments, an isolated FN3 domain that binds CD71 comprises the amino acid sequence of SEQ ID NO: 588. In some embodiments, an isolated FN3 domain that binds CD71 comprises the amino acid sequence of SEQ ID NO: 589. In some embodiments, an isolated FN3 domain that binds CD71 comprises the amino acid sequence of SEQ ID NO: 590. In some embodiments, an isolated FN3 domain that binds CD71 comprises the amino acid sequence of SEQ ID NO: 591. In some embodiments, an isolated FN3 domain that binds CD71 comprises the amino acid sequence of SEQ ID NO: 592. In some embodiments, an isolated FN3 domain that binds CD71 comprises the amino acid sequence of SEQ ID NO: 593. In some embodiments, an isolated FN3 domain that binds CD71 comprises the amino acid sequence of SEQ ID NO: 594. In some embodiments, an isolated FN3 domain that binds CD71 comprises the amino acid sequence of SEQ ID NO: 595. In some embodiments, an isolated FN3 domain that binds CD71 comprises the amino acid sequence of SEQ ID NO: 596. In some embodiments, an isolated FN3 domain that binds CD71 comprises the amino acid sequence of SEQ ID NO: 597. In some embodiments, an isolated FN3 domain that binds CD71 comprises the amino acid sequence of SEQ ID NO: 598. In some embodiments, an isolated FN3 domain that binds CD71 comprises the amino acid sequence of SEQ ID NO: 599. In some embodiments, an isolated FN3 domain that binds CD71 comprises the amino acid sequence of SEQ ID NO: 600. In some embodiments, an isolated FN3 domain that binds CD71 comprises the amino acid sequence of SEQ ID NO: 601. In some embodiments, an isolated FN3 domain that binds CD71 comprises the amino acid sequence of SEQ ID NO: 602. In some embodiments, an isolated FN3 domain that binds CD71 comprises the amino acid sequence of SEQ ID NO: 603. In some embodiments, an isolated FN3 domain that binds CD71 comprises the amino acid sequence of SEQ ID NO: 604. In some embodiments, an isolated FN3 domain that binds CD71 comprises the amino acid sequence of SEQ ID NO: 605. In some embodiments, an isolated FN3 domain that binds CD71 comprises the amino acid sequence of SEQ ID NO: 606. In some embodiments, an isolated FN3 domain that binds CD71 comprises the amino acid sequence of SEQ ID NO: 607. In some embodiments, an isolated FN3 domain that binds CD71 comprises the amino acid sequence of SEQ ID NO: 608. In some embodiments, an isolated FN3 domain that binds CD71 comprises the amino acid sequence of SEQ ID NO: 609. In some embodiments, an isolated FN3 domain that binds CD71 comprises the amino acid sequence of SEQ ID NO: 610. In some embodiments, an isolated FN3 domain that binds CD71 comprises the amino acid sequence of SEQ ID NO: 611. In some embodiments, an isolated FN3 domain that binds CD71 comprises the amino acid sequence of SEQ ID NO: 612. In some embodiments, an isolated FN3 domain that binds CD71 comprises the amino acid sequence of SEQ ID NO: 613. In some embodiments, an isolated FN3 domain that binds CD71 comprises the amino acid sequence of SEQ ID NO: 614. In some embodiments, an isolated FN3 domain that binds CD71 comprises the amino acid sequence of SEQ ID NO: 615. In some embodiments, an isolated FN3 domain that binds CD71 comprises the amino acid sequence of SEQ ID NO: 616. In some embodiments, an isolated FN3 domain that binds CD71 comprises the amino acid sequence of SEQ ID NO: 617. In some embodiments, an isolated FN3 domain that binds CD71 comprises the amino acid sequence of SEQ ID NO: 618. In some embodiments, an isolated FN3 domain that binds CD71 comprises the amino acid sequence of SEQ ID NO: 619. In some embodiments, an isolated FN3 domain that binds CD71 comprises the amino acid sequence of SEQ ID NO: 620. In some embodiments, an isolated FN3 domain that binds CD71 comprises the amino acid sequence of SEQ ID NO: 621. In some embodiments, an isolated FN3 domain that binds CD71 comprises the amino acid sequence of SEQ ID NO: 622. In some embodiments, an isolated FN3 domain that binds CD71 comprises the amino acid sequence of SEQ ID NO: 623. In some embodiments, an isolated FN3 domain that binds CD71 comprises the amino acid sequence of SEQ ID NO: 624. In some embodiments, an isolated FN3 domain that binds CD71 comprises the amino acid sequence of SEQ ID NO: 625. In some embodiments, an isolated FN3 domain that binds CD71 comprises the amino acid sequence of SEQ ID NO: 626. In some embodiments, an isolated FN3 domain that binds CD71 comprises the amino acid sequence of SEQ ID NO: 627. In some embodiments, an isolated FN3 domain that binds CD71 comprises the amino acid sequence of SEQ ID NO: 628. In some embodiments, an isolated FN3 domain that binds CD71 comprises the amino acid sequence of SEQ ID NO: 629. In some embodiments, an isolated FN3 domain that binds CD71 comprises the amino acid sequence of SEQ ID NO: 630. In some embodiments, an isolated FN3 domain that binds CD71 comprises the amino acid sequence of SEQ ID NO: 631. In some embodiments, an isolated FN3 domain that binds CD71 comprises the amino acid sequence of SEQ ID NO: 632. In some embodiments, an isolated FN3 domain that binds CD71 comprises the amino acid sequence of SEQ ID NO: 633. In some embodiments, an isolated FN3 domain that binds CD71 comprises the amino acid sequence of SEQ ID NO: 634. In some embodiments, an isolated FN3 domain that binds CD71 comprises the amino acid sequence of SEQ ID NO: 635. In some embodiments, an isolated FN3 domain that binds CD71 comprises the amino acid sequence of SEQ ID NO: 636. In some embodiments, an isolated FN3 domain that binds CD71 comprises the amino acid sequence of SEQ ID NO: 637. In some embodiments, an isolated FN3 domain that binds CD71 comprises the amino acid sequence of SEQ ID NO: 638. In some embodiments, an isolated FN3 domain that binds CD71 comprises the amino acid sequence of SEQ ID NO: 639. In some embodiments, an isolated FN3 domain that binds CD71 comprises the amino acid sequence of SEQ ID NO: 640. In some embodiments, an isolated FN3 domain that binds CD71 comprises the amino acid sequence of SEQ ID NO: 641. In some embodiments, an isolated FN3 domain that binds CD71 comprises the amino acid sequence of SEQ ID NO: 642. In some embodiments, an isolated FN3 domain that binds CD71 comprises the amino acid sequence of SEQ ID NO: 643. In some embodiments, an isolated FN3 domain that binds CD71 comprises the amino acid sequence of SEQ ID NO: 644. In some embodiments, an isolated FN3 domain that binds CD71 comprises the amino acid sequence of SEQ ID NO: 663. In some embodiments, an isolated FN3 domain that binds CD71 comprises the amino acid sequence of SEQ ID NO: 664. In some embodiments, an isolated FN3 domain that binds CD71 comprises the amino acid sequence of SEQ ID NO: 665. In some embodiments, an isolated FN3 domain that binds CD71 comprises the amino acid sequence of SEQ ID NO: 666. In some embodiments, an isolated FN3 domain that binds CD71 comprises the amino acid sequence of SEQ ID NO: 667. In some embodiments, an isolated FN3 domain that binds CD71 comprises the amino acid sequence of SEQ ID NO: 668. In some embodiments, an isolated FN3 domain that binds CD71 comprises the amino acid sequence of SEQ ID NO: 669. In some embodiments, an isolated FN3 domain that binds CD71 comprises the amino acid sequence of SEQ ID NO: 670. In some embodiments, an isolated FN3 domain that binds CD71 comprises the amino acid sequence of SEQ ID NO: 671. In some embodiments, an isolated FN3 domain that binds CD71 comprises the amino acid sequence of SEQ ID NO: 672. In some embodiments, an isolated FN3 domain that binds CD71 comprises the amino acid sequence of SEQ ID NO: 1395. In some embodiments, an isolated FN3 domain that binds CD71 comprises the amino acid sequence of SEQ ID NO: 1396. In some embodiments, an isolated FN3 domain that binds CD71 comprises the amino acid sequence of SEQ ID NO: 1397. In some embodiments, an isolated FN3 domain that binds CD71 comprises the amino acid sequence of SEQ ID NO: 1398. In some embodiments, an isolated FN3 domain that binds CD71 comprises the amino acid sequence of SEQ ID NO: 1399. In some embodiments, an isolated FN3 domain that binds CD71 comprises the amino acid sequence of SEQ ID NO: 1400. In some embodiments, an isolated FN3 domain that binds CD71 comprises the amino acid sequence of SEQ ID NO: 1401. In some embodiments, an isolated FN3 domain that binds CD71 comprises the amino acid sequence of SEQ ID NO: 1402. In some embodiments, an isolated FN3 domain that binds CD71 comprises the amino acid sequence of SEQ ID NO: 1403. In some embodiments, an isolated FN3 domain that binds CD71 comprises the amino acid sequence of SEQ ID NO: 1404. In some embodiments, an isolated FN3 domain that binds CD71 comprises the amino acid sequence of SEQ ID NO: 1405. In some embodiments, an isolated FN3 domain that binds CD71 comprises the amino acid sequence of SEQ ID NO: 1406. In some embodiments, an isolated FN3 domain that binds CD71 comprises the amino acid sequence of SEQ ID NO: 1407. In some embodiments, an isolated FN3 domain that binds CD71 comprises the amino acid sequence of SEQ ID NO: 1408. In some embodiments, an isolated FN3 domain that binds CD71 comprises the amino acid sequence of SEQ ID NO: 1409. In some embodiments, an isolated FN3 domain that binds CD71 comprises the amino acid sequence of SEQ ID NO: 1410. In some embodiments, an isolated FN3 domain that binds CD71 comprises the amino acid sequence of SEQ ID NO: 1411. In some embodiments, an isolated FN3 domain that binds CD71 comprises the amino acid sequence of SEQ ID NO: 1412. In some embodiments, an isolated FN3 domain that binds CD71 comprises the amino acid sequence of SEQ ID NO: 1413. In some embodiments, an isolated FN3 domain that binds CD71 comprises the amino acid sequence of SEQ ID NO: 1414. In some embodiments, an isolated FN3 domain that binds CD71 comprises the amino acid sequence of SEQ ID NO: 1415. In some embodiments, an isolated FN3 domain that binds CD71 comprises the amino acid sequence of SEQ ID NO: 1416. In some embodiments, an isolated FN3 domain that binds CD71 comprises the amino acid sequence of SEQ ID NO: 1417. In some embodiments, an isolated FN3 domain that binds CD71 comprises the amino acid sequence of SEQ ID NO: 1418. In some embodiments, an isolated FN3 domain that binds CD71 comprises the amino acid sequence of SEQ ID NO: 1419. In some embodiments, an isolated FN3 domain that binds CD71 comprises the amino acid sequence of SEQ ID NO: 1420. In some embodiments, an isolated FN3 domain that binds CD71 comprises the amino acid sequence of SEQ ID NO: 1421. In some embodiments, an isolated FN3 domain that binds CD71 comprises the amino acid sequence of SEQ ID NO: 1422. In some embodiments, an isolated FN3 domain that binds CD71 comprises the amino acid sequence of SEQ ID NO: 1423. In some embodiments, an isolated FN3 domain that binds CD71 comprises the amino acid sequence of SEQ ID NO: 1424. In some embodiments, an isolated FN3 domain that binds CD71 comprises the amino acid sequence of SEQ ID NO: 1425. In some embodiments, an isolated FN3 domain that binds CD71 comprises the amino acid sequence of SEQ ID NO: 1426. In some embodiments, an isolated FN3 domain that binds CD71 comprises the amino acid sequence of SEQ ID NO: 1427. In some embodiments, an isolated FN3 domain that binds CD71 comprises the amino acid sequence of SEQ ID NO: 1428. In some embodiments, an isolated FN3 domain that binds CD71 comprises the amino acid sequence of SEQ ID NO: 1429. In some embodiments, an isolated FN3 domain that binds CD71 comprises the amino acid sequence of SEQ ID NO: 1430. In some embodiments, an isolated FN3 domain that binds CD71 comprises the amino acid sequence of SEQ ID NO: 1431. In some embodiments, an isolated FN3 domain that binds CD71 comprises the amino acid sequence of SEQ ID NO: 1432. In some embodiments, an isolated FN3 domain that binds CD71 comprises the amino acid sequence of SEQ ID NO: 1433. In some embodiments, an isolated FN3 domain that binds CD71 comprises the amino acid sequence of SEQ ID NO: 1434. In some embodiments, an isolated FN3 domain that binds CD71 comprises the amino acid sequence of SEQ ID NO: 1435. In some embodiments, an isolated FN3 domain that binds CD71 comprises the amino acid sequence of SEQ ID NO: 1436. In some embodiments, an isolated FN3 domain that binds CD71 comprises the amino acid sequence of SEQ ID NO: 1437. In some embodiments, an isolated FN3 domain that binds CD71 comprises the amino acid sequence of SEQ ID NO: 1438. In some embodiments, an isolated FN3 domain that binds CD71 comprises the amino acid sequence of SEQ ID NO: 1439. In some embodiments, an isolated FN3 domain that binds CD71 comprises the amino acid sequence of SEQ ID NO: 1440. In some embodiments, an isolated FN3 domain that binds CD71 comprises the amino acid sequence of SEQ ID NO: 1441. In some embodiments, an isolated FN3 domain that binds CD71 comprises the amino acid sequence of SEQ ID NO: 1442. In some embodiments, an isolated FN3 domain that binds CD71 comprises the amino acid sequence of SEQ ID NO: 1443. In some embodiments, an isolated FN3 domain that binds CD71 comprises the amino acid sequence of SEQ ID NO: 1444. In some embodiments, an isolated FN3 domain that binds CD71 comprises the amino acid sequence of SEQ ID NO: 1445. In some embodiments, an isolated FN3 domain that binds CD71 comprises the amino acid sequence of SEQ ID NO: 1446. In some embodiments, an isolated FN3 domain that binds CD71 comprises the amino acid sequence of SEQ ID NO: 1447. In some embodiments, an isolated FN3 domain that binds CD71 comprises the amino acid sequence of SEQ ID NO: 1448. In some embodiments, an isolated FN3 domain that binds CD71 comprises the amino acid sequence of SEQ ID NO: 1449. In some embodiments, an isolated FN3 domain that binds CD71 comprises the amino acid sequence of SEQ ID NO: 1450. In some embodiments, an isolated FN3 domain that binds CD71 comprises the amino acid sequence of SEQ ID NO: 1451. In some embodiments, an isolated FN3 domain that binds CD71 comprises the amino acid sequence of SEQ ID NO: 1452. In some embodiments, an isolated FN3 domain that binds CD71 comprises the amino acid sequence of SEQ ID NO: 1453. In some embodiments, an isolated FN3 domain that binds CD71 comprises the amino acid sequence of SEQ ID NO: 1454. In some embodiments, an isolated FN3 domain that binds CD71 comprises the amino acid sequence of SEQ ID NO: 1455. In some embodiments, an isolated FN3 domain that binds CD71 comprises the amino acid sequence of SEQ ID NO: 1456. In some embodiments, an isolated FN3 domain that binds CD71 comprises the amino acid sequence of SEQ ID NO: 1457. In some embodiments, an isolated FN3 domain that binds CD71 comprises the amino acid sequence of SEQ ID NO: 1458. In some embodiments, an isolated FN3 domain that binds CD71 comprises the amino acid sequence of SEQ ID NO: 1459. In some embodiments, an isolated FN3 domain that binds CD71 comprises the amino acid sequence of SEQ ID NO: 1460. In some embodiments, an isolated FN3 domain that binds CD71 comprises the amino acid sequence of SEQ ID NO: 1461. In some embodiments, an isolated FN3 domain that binds CD71 comprises the amino acid sequence of SEQ ID NO: 1462. In some embodiments, an isolated FN3 domain that binds CD71 comprises the amino acid sequence of SEQ ID NO: 1463. In some embodiments, an isolated FN3 domain that binds CD71 comprises the amino acid sequence of SEQ ID NO: 1464. In some embodiments, an isolated FN3 domain that binds CD71 comprises the amino acid sequence of SEQ ID NO: 1465. In some embodiments, an isolated FN3 domain that binds CD71 comprises the amino acid sequence of SEQ ID NO: 1466. In some embodiments, an isolated FN3 domain that binds CD71 comprises the amino acid sequence of SEQ ID NO: 1467. In some embodiments, an isolated FN3 domain that binds CD71 comprises the amino acid sequence of SEQ ID NO: 1468. In some embodiments, an isolated FN3 domain that binds CD71 comprises the amino acid sequence of SEQ ID NO: 1469. In some embodiments, an isolated FN3 domain that binds CD71 comprises the amino acid sequence of SEQ ID NO: 1470. In some embodiments, an isolated FN3 domain that binds CD71 comprises the amino acid sequence of SEQ ID NO: 1471. In some embodiments, an isolated FN3 domain that binds CD71 comprises the amino acid sequence of SEQ ID NO: 1472. In some embodiments, an isolated FN3 domain that binds CD71 comprises the amino acid sequence of SEQ ID NO: 1473. In some embodiments, an isolated FN3 domain that binds CD71 comprises the amino acid sequence of SEQ ID NO: 1474. In some embodiments, an isolated FN3 domain that binds CD71 comprises the amino acid sequence of SEQ ID NO: 1475. In some embodiments, an isolated FN3 domain that binds CD71 comprises the amino acid sequence of SEQ ID NO: 1476. In some embodiments, an isolated FN3 domain that binds CD71 comprises the amino acid sequence of SEQ ID NO: 1477. In some embodiments, an isolated FN3 domain that binds CD71 comprises the amino acid sequence of SEQ ID NO: 1478. In some embodiments, an isolated FN3 domain that binds CD71 comprises the amino acid sequence of SEQ ID NO: 1479. In some embodiments, an isolated FN3 domain that binds CD71 comprises the amino acid sequence of SEQ ID NO: 1480. In some embodiments, an isolated FN3 domain that binds CD71 comprises the amino acid sequence of SEQ ID NO: 1481. In some embodiments, an isolated FN3 domain that binds CD71 comprises the amino acid sequence of SEQ ID NO: 1482. In some embodiments, an isolated FN3 domain that binds CD71 comprises the amino acid sequence of SEQ ID NO: 1483. In some embodiments, an isolated FN3 domain that binds CD71 comprises the amino acid sequence of SEQ ID NO: 1484. In some embodiments, an isolated FN3 domain that binds CD71 comprises the amino acid sequence of SEQ ID NO: 1485. In some embodiments, an isolated FN3 domain that binds CD71 comprises the amino acid sequence of SEQ ID NO: 1486. In some embodiments, an isolated FN3 domain that binds CD71 comprises the amino acid sequence of SEQ ID NO: 1487. In some embodiments, an isolated FN3 domain that binds CD71 comprises the amino acid sequence of SEQ ID NO: 1488. In some embodiments, an isolated FN3 domain that binds CD71 comprises the amino acid sequence of SEQ ID NO: 1489. In some embodiments, an isolated FN3 domain that binds CD71 comprises the amino acid sequence of SEQ ID NO: 1490. In some embodiments, an isolated FN3 domain that binds CD71 comprises the amino acid sequence of SEQ ID NO: 1491. In some embodiments, an isolated FN3 domain that binds CD71 comprises the amino acid sequence of SEQ ID NO: 1492. In some embodiments, an isolated FN3 domain that binds CD71 comprises the amino acid sequence of SEQ ID NO: 1493. In some embodiments, an isolated FN3 domain that binds CD71 comprises the amino acid sequence of SEQ ID NO: 1494. In some embodiments, an isolated FN3 domain that binds CD71 comprises the amino acid sequence of SEQ ID NO: 1495. In some embodiments, an isolated FN3 domain that binds CD71 comprises the amino acid sequence of SEQ ID NO: 1496. In some embodiments, an isolated FN3 domain that binds CD71 comprises the amino acid sequence of SEQ ID NO: 1497. In some embodiments, an isolated FN3 domain that binds CD71 comprises the amino acid sequence of SEQ ID NO: 1498. In some embodiments, an isolated FN3 domain that binds CD71 comprises the amino acid sequence of SEQ ID NO: 1499. In some embodiments, an isolated FN3 domain that binds CD71 comprises the amino acid sequence of SEQ ID NO: 1500. In some embodiments, an isolated FN3 domain that binds CD71 comprises the amino acid sequence of SEQ ID NO: 1501. In some embodiments, an isolated FN3 domain that binds CD71 comprises the amino acid sequence of SEQ ID NO: 1502. In some embodiments, an isolated FN3 domain that binds CD71 comprises the amino acid sequence of SEQ ID NO: 1503. In some embodiments, an isolated FN3 domain that binds CD71 comprises the amino acid sequence of SEQ ID NO: 1504. In some embodiments, an isolated FN3 domain that binds CD71 comprises the amino acid sequence of SEQ ID NO: 1505. In some embodiments, an isolated FN3 domain that binds CD71 comprises the amino acid sequence of SEQ ID NO: 1506. In some embodiments, an isolated FN3 domain that binds CD71 comprises the amino acid sequence of SEQ ID NO: 1507. In some embodiments, an isolated FN3 domain that binds CD71 comprises the amino acid sequence of SEQ ID NO: 1508. In some embodiments, an isolated FN3 domain that binds CD71 comprises the amino acid sequence of SEQ ID NO: 1509. In some embodiments, an isolated FN3 domain that binds CD71 comprises the amino acid sequence of SEQ ID NO: 1510. In some embodiments, an isolated FN3 domain that binds CD71 comprises the amino acid sequence of SEQ ID NO: 1511. In some embodiments, an isolated FN3 domain that binds CD71 comprises the amino acid sequence of SEQ ID NO: 1512. In some embodiments, an isolated FN3 domain that binds CD71 comprises the amino acid sequence of SEQ ID NO: 1513. In some embodiments, an isolated FN3 domain that binds CD71 comprises the amino acid sequence of SEQ ID NO: 1514. In some embodiments, an isolated FN3 domain that binds CD71 comprises the amino acid sequence of SEQ ID NO: 1515. In some embodiments, an isolated FN3 domain that binds CD71 comprises the amino acid sequence of SEQ ID NO: 1516. In some embodiments, an isolated FN3 domain that binds CD71 comprises the amino acid sequence of SEQ ID NO: 1517. In some embodiments, an isolated FN3 domain that binds CD71 comprises the amino acid sequence of SEQ ID NO: 1518. In some embodiments, an isolated FN3 domain that binds CD71 comprises the amino acid sequence of SEQ ID NO: 1519. In some embodiments, an isolated FN3 domain that binds CD71 comprises the amino acid sequence of SEQ ID NO: 1520. In some embodiments, an isolated FN3 domain that binds CD71 comprises the amino acid sequence of SEQ ID NO: 1521. In some embodiments, an isolated FN3 domain that binds CD71 comprises the amino acid sequence of SEQ ID NO: 1522. In some embodiments, an isolated FN3 domain that binds CD71 comprises the amino acid sequence of SEQ ID NO: 1523. In some embodiments, an isolated FN3 domain that binds CD71 comprises the amino acid sequence of SEQ ID NO: 1524. In some embodiments, an isolated FN3 domain that binds CD71 comprises the amino acid sequence of SEQ ID NO: 1525. In some embodiments, an isolated FN3 domain that binds CD71 comprises the amino acid sequence of SEQ ID NO: 1526. In some embodiments, an isolated FN3 domain that binds CD71 comprises the amino acid sequence of SEQ ID NO: 1527. In some embodiments, an isolated FN3 domain that binds CD71 comprises the amino acid sequence of SEQ ID NO: 1528. In some embodiments, an isolated FN3 domain that binds CD71 comprises the amino acid sequence of SEQ ID NO: 1529. In some embodiments, an isolated FN3 domain that binds CD71 comprises the amino acid sequence of SEQ ID NO: 1530. In some embodiments, an isolated FN3 domain that binds CD71 comprises the amino acid sequence of SEQ ID NO: 1531. In some embodiments, an isolated FN3 domain that binds CD71 comprises the amino acid sequence of SEQ ID NO: 1532. In some embodiments, an isolated FN3 domain that binds CD71 comprises the amino acid sequence of SEQ ID NO: 1533. In some embodiments, an isolated FN3 domain that binds CD71 comprises the amino acid sequence of SEQ ID NO: 1534. In some embodiments, an isolated FN3 domain that binds CD71 comprises the amino acid sequence of SEQ ID NO: 1535. In some embodiments, an isolated FN3 domain that binds CD71 comprises the amino acid sequence of SEQ ID NO: 1536. In some embodiments, an isolated FN3 domain that binds CD71 comprises the amino acid sequence of SEQ ID NO: 1537. In some embodiments, an isolated FN3 domain that binds CD71 comprises the amino acid sequence of SEQ ID NO: 1538. In some embodiments, an isolated FN3 domain that binds CD71 comprises the amino acid sequence of SEQ ID NO: 1539. In some embodiments, an isolated FN3 domain that binds CD71 comprises the amino acid sequence of SEQ ID NO: 1540. In some embodiments, an isolated FN3 domain that binds CD71 comprises the amino acid sequence of SEQ ID NO: 1541. In some embodiments, an isolated FN3 domain that binds CD71 comprises the amino acid sequence of SEQ ID NO: 1542. In some embodiments, an isolated FN3 domain that binds CD71 comprises the amino acid sequence of SEQ ID NO: 1543. In some embodiments, an isolated FN3 domain that binds CD71 comprises the amino acid sequence of SEQ ID NO: 1544. In some embodiments, an isolated FN3 domain that binds CD71 comprises the amino acid sequence of SEQ ID NO: 1545. In some embodiments, an isolated FN3 domain that binds CD71 comprises the amino acid sequence of SEQ ID NO: 1546. In some embodiments, an isolated FN3 domain that binds CD71 comprises the amino acid sequence of SEQ ID NO: 1547. In some embodiments, an isolated FN3 domain that binds CD71 comprises the amino acid sequence of SEQ ID NO: 1548. In some embodiments, an isolated FN3 domain that binds CD71 comprises the amino acid sequence of SEQ ID NO: 1549. In some embodiments, an isolated FN3 domain that binds CD71 comprises the amino acid sequence of SEQ ID NO: 1550. In some embodiments, an isolated FN3 domain that binds CD71 comprises the amino acid sequence of SEQ ID NO: 1551. In some embodiments, an isolated FN3 domain that binds CD71 comprises the amino acid sequence of SEQ ID NO: 1552. In some embodiments, an isolated FN3 domain that binds CD71 comprises the amino acid sequence of SEQ ID NO: 1553. In some embodiments, an isolated FN3 domain that binds CD71 comprises the amino acid sequence of SEQ ID NO: 1554. In some embodiments, an isolated FN3 domain that binds CD71 comprises the amino acid sequence of SEQ ID NO: 1555. In some embodiments, an isolated FN3 domain that binds CD71 comprises the amino acid sequence of SEQ ID NO: 1556. In some embodiments, an isolated FN3 domain that binds CD71 comprises the amino acid sequence of SEQ ID NO: 1557. In some embodiments, an isolated FN3 domain that binds CD71 comprises the amino acid sequence of SEQ ID NO: 1558. In some embodiments, an isolated FN3 domain that binds CD71 comprises the amino acid sequence of SEQ ID NO: 1559. In some embodiments, an isolated FN3 domain that binds CD71 comprises the amino acid sequence of SEQ ID NO: 1560. In some embodiments, an isolated FN3 domain that binds CD71 comprises the amino acid sequence of SEQ ID NO: 1561. In some embodiments, an isolated FN3 domain that binds CD71 comprises the amino acid sequence of SEQ ID NO: 1562. In some embodiments, an isolated FN3 domain that binds CD71 comprises the amino acid sequence of SEQ ID NO: 1563. In some embodiments, an isolated FN3 domain that binds CD71 comprises the amino acid sequence of SEQ ID NO: 1564. In some embodiments, an isolated FN3 domain that binds CD71 comprises the amino acid sequence of SEQ ID NO: 1565. In some embodiments, an isolated FN3 domain that binds CD71 comprises the amino acid sequence of SEQ ID NO: 1566. In some embodiments, an isolated FN3 domain that binds CD71 comprises the amino acid sequence of SEQ ID NO: 1567. In some embodiments, an isolated FN3 domain that binds CD71 comprises the amino acid sequence of SEQ ID NO: 1568. In some embodiments, an isolated FN3 domain that binds CD71 comprises the amino acid sequence of SEQ ID NO: 1569. In some embodiments, an isolated FN3 domain that binds CD71 comprises the amino acid sequence of SEQ ID NO: 1570. In some embodiments, an isolated FN3 domain that binds CD71 comprises the amino acid sequence of SEQ ID NO: 1571. In some embodiments, an isolated FN3 domain that binds CD71 comprises the amino acid sequence of SEQ ID NO: 1572. In some embodiments, an isolated FN3 domain that binds CD71 comprises the amino acid sequence of SEQ ID NO: 1573. In some embodiments, an isolated FN3 domain that binds CD71 comprises the amino acid sequence of SEQ ID NO: 1574. In some embodiments, an isolated FN3 domain that binds CD71 comprises the amino acid sequence of SEQ ID NO: 1575. In some embodiments, an isolated FN3 domain that binds CD71 comprises the amino acid sequence of SEQ ID NO: 1576. In some embodiments, an isolated FN3 domain that binds CD71 comprises the amino acid sequence of SEQ ID NO: 1577. In some embodiments, an isolated FN3 domain that binds CD71 comprises the amino acid sequence of SEQ ID NO: 1578. In some embodiments, an isolated FN3 domain that binds CD71 comprises the amino acid sequence of SEQ ID NO: 1579. In some embodiments, an isolated FN3 domain that binds CD71 comprises the amino acid sequence of SEQ ID NO: 1580. In some embodiments, an isolated FN3 domain that binds CD71 comprises the amino acid sequence of SEQ ID NO: 1581. In some embodiments, an isolated FN3 domain that binds CD71 comprises the amino acid sequence of SEQ ID NO: 1582. In some embodiments, an isolated FN3 domain that binds CD71 comprises the amino acid sequence of SEQ ID NO: 1583. In some embodiments, an isolated FN3 domain that binds CD71 comprises the amino acid sequence of SEQ ID NO: 1584. In some embodiments, an isolated FN3 domain that binds CD71 comprises the amino acid sequence of SEQ ID NO: 1585. In some embodiments, an isolated FN3 domain that binds CD71 comprises the amino acid sequence of SEQ ID NO: 1586. In some embodiments, an isolated FN3 domain that binds CD71 comprises the amino acid sequence of SEQ ID NO: 1587. In some embodiments, an isolated FN3 domain that binds CD71 comprises the amino acid sequence of SEQ ID NO: 1588. In some embodiments, an isolated FN3 domain that binds CD71 comprises the amino acid sequence of SEQ ID NO: 1589. In some embodiments, an isolated FN3 domain that binds CD71 comprises the amino acid sequence of SEQ ID NO: 1590. In some embodiments, an isolated FN3 domain that binds CD71 comprises the amino acid sequence of SEQ ID NO: 1591. In some embodiments, an isolated FN3 domain that binds CD71 comprises the amino acid sequence of SEQ ID NO: 1592. In some embodiments, an isolated FN3 domain that binds CD71 comprises the amino acid sequence of SEQ ID NO: 1593. In some embodiments, an isolated FN3 domain that binds CD71 comprises the amino acid sequence of SEQ ID NO: 1594. In some embodiments, an isolated FN3 domain that binds CD71 comprises the amino acid sequence of SEQ ID NO: 1595. In some embodiments, an isolated FN3 domain that binds CD71 comprises the amino acid sequence of SEQ ID NO: 1596. In some embodiments, an isolated FN3 domain that binds CD71 comprises the amino acid sequence of SEQ ID NO: 1597. In some embodiments, an isolated FN3 domain that binds CD71 comprises the amino acid sequence of SEQ ID NO: 1598. In some embodiments, an isolated FN3 domain that binds CD71 comprises the amino acid sequence of SEQ ID NO: 1599. In some embodiments, an isolated FN3 domain that binds CD71 comprises the amino acid sequence of SEQ ID NO: 1600. In some embodiments, an isolated FN3 domain that binds CD71 comprises the amino acid sequence of SEQ ID NO: 1601. In some embodiments, an isolated FN3 domain that binds CD71 comprises the amino acid sequence of SEQ ID NO: 1602. In some embodiments, an isolated FN3 domain that binds CD71 comprises the amino acid sequence of SEQ ID NO: 1603. In some embodiments, an isolated FN3 domain that binds CD71 comprises the amino acid sequence of SEQ ID NO: 1604. In some embodiments, an isolated FN3 domain that binds CD71 comprises the amino acid sequence of SEQ ID NO: 1605. In some embodiments, an isolated FN3 domain that binds CD71 comprises the amino acid sequence of SEQ ID NO: 1606. In some embodiments, an isolated FN3 domain that binds CD71 comprises the amino acid sequence of SEQ ID NO: 1607. In some embodiments, an isolated FN3 domain that binds CD71 comprises the amino acid sequence of SEQ ID NO: 1608. In some embodiments, an isolated FN3 domain that binds CD71 comprises the amino acid sequence of SEQ ID NO: 1609. In some embodiments, an isolated FN3 domain that binds CD71 comprises the amino acid sequence of SEQ ID NO: 1610. In some embodiments, an isolated FN3 domain that binds CD71 comprises the amino acid sequence of SEQ ID NO: 1611. In some embodiments, an isolated FN3 domain that binds CD71 comprises the amino acid sequence of SEQ ID NO: 1612. In some embodiments, an isolated FN3 domain that binds CD71 comprises the amino acid sequence of SEQ ID NO: 1613. In some embodiments, an isolated FN3 domain that binds CD71 comprises the amino acid sequence of SEQ ID NO: 1614. In some embodiments, an isolated FN3 domain that binds CD71 comprises the amino acid sequence of SEQ ID NO: 1615. In some embodiments, an isolated FN3 domain that binds CD71 comprises the amino acid sequence of SEQ ID NO: 1616. In some embodiments, an isolated FN3 domain that binds CD71 comprises the amino acid sequence of SEQ ID NO: 1617. In some embodiments, an isolated FN3 domain that binds CD71 comprises the amino acid sequence of SEQ ID NO: 1618. In some embodiments, an isolated FN3 domain that binds CD71 comprises the amino acid sequence of SEQ ID NO: 1619. In some embodiments, an isolated FN3 domain that binds CD71 comprises the amino acid sequence of SEQ ID NO: 1620. In some embodiments, an isolated FN3 domain that binds CD71 comprises the amino acid sequence of SEQ ID NO: 1621. In some embodiments, an isolated FN3 domain that binds CD71 comprises the amino acid sequence of SEQ ID NO: 1622. In some embodiments, an isolated FN3 domain that binds CD71 comprises the amino acid sequence of SEQ ID NO: 1623. In some embodiments, an isolated FN3 domain that binds CD71 comprises the amino acid sequence of SEQ ID NO: 1624. In some embodiments, an isolated FN3 domain that binds CD71 comprises the amino acid sequence of SEQ ID NO: 1625. In some embodiments, an isolated FN3 domain that binds CD71 comprises the amino acid sequence of SEQ ID NO: 1626. In some embodiments, an isolated FN3 domain that binds CD71 comprises the amino acid sequence of SEQ ID NO: 1627. In some embodiments, an isolated FN3 domain that binds CD71 comprises the amino acid sequence of SEQ ID NO: 1628. In some embodiments, an isolated FN3 domain that binds CD71 comprises the amino acid sequence of SEQ ID NO: 1629. In some embodiments, an isolated FN3 domain that binds CD71 comprises the amino acid sequence of SEQ ID NO: 1630. In some embodiments, an isolated FN3 domain that binds CD71 comprises the amino acid sequence of SEQ ID NO: 1631. In some embodiments, an isolated FN3 domain that binds CD71 comprises the amino acid sequence of SEQ ID NO: 1632. In some embodiments, an isolated FN3 domain that binds CD71 comprises the amino acid sequence of SEQ ID NO: 1633. In some embodiments, an isolated FN3 domain that binds CD71 comprises the amino acid sequence of SEQ ID NO: 1634. In some embodiments, an isolated FN3 domain that binds CD71 comprises the amino acid sequence of SEQ ID NO: 1635. In some embodiments, an isolated FN3 domain that binds CD71 comprises the amino acid sequence of SEQ ID NO: 1636. In some embodiments, an isolated FN3 domain that binds CD71 comprises the amino acid sequence of SEQ ID NO: 1637. In some embodiments, an isolated FN3 domain that binds CD71 comprises the amino acid sequence of SEQ ID NO: 1638. In some embodiments, an isolated FN3 domain that binds CD71 comprises the amino acid sequence of SEQ ID NO: 1639. In some embodiments, an isolated FN3 domain that binds CD71 comprises the amino acid sequence of SEQ ID NO: 1640. In some embodiments, an isolated FN3 domain that binds CD71 comprises the amino acid sequence of SEQ ID NO: 1641. In some embodiments, an isolated FN3 domain that binds CD71 comprises the amino acid sequence of SEQ ID NO: 1642. In some embodiments, an isolated FN3 domain that binds CD71 comprises the amino acid sequence of SEQ ID NO: 1643. In some embodiments, an isolated FN3 domain that binds CD71 comprises the amino acid sequence of SEQ ID NO: 1644. In some embodiments, an isolated FN3 domain that binds CD71 comprises the amino acid sequence of SEQ ID NO: 1645. In some embodiments, an isolated FN3 domain that binds CD71 comprises the amino acid sequence of SEQ ID NO: 1646. In some embodiments, an isolated FN3 domain that binds CD71 comprises the amino acid sequence of SEQ ID NO: 1647. In some embodiments, an isolated FN3 domain that binds CD71 comprises the amino acid sequence of SEQ ID NO: 1648. In some embodiments, an isolated FN3 domain that binds CD71 comprises the amino acid sequence of SEQ ID NO: 1649. In some embodiments, an isolated FN3 domain that binds CD71 comprises the amino acid sequence of SEQ ID NO: 1650. In some embodiments, an isolated FN3 domain that binds CD71 comprises the amino acid sequence of SEQ ID NO: 1651. In some embodiments, an isolated FN3 domain that binds CD71 comprises the amino acid sequence of SEQ ID NO: 1652. In some embodiments, an isolated FN3 domain that binds CD71 comprises the amino acid sequence of SEQ ID NO: 1653. In some embodiments, an isolated FN3 domain that binds CD71 comprises the amino acid sequence of SEQ ID NO: 1654. In some embodiments, an isolated FN3 domain that binds CD71 comprises the amino acid sequence of SEQ ID NO: 1655. In some embodiments, an isolated FN3 domain that binds CD71 comprises the amino acid sequence of SEQ ID NO: 1656. In some embodiments, an isolated FN3 domain that binds CD71 comprises the amino acid sequence of SEQ ID NO: 1657. In some embodiments, an isolated FN3 domain that binds CD71 comprises the amino acid sequence of SEQ ID NO: 1658. In some embodiments, an isolated FN3 domain that binds CD71 comprises the amino acid sequence of SEQ ID NO: 1659. In some embodiments, an isolated FN3 domain that binds CD71 comprises the amino acid sequence of SEQ ID NO: 1660. In some embodiments, an isolated FN3 domain that binds CD71 comprises the amino acid sequence of SEQ ID NO: 1661. In some embodiments, an isolated FN3 domain that binds CD71 comprises the amino acid sequence of SEQ ID NO: 1662. In some embodiments, an isolated FN3 domain that binds CD71 comprises the amino acid sequence of SEQ ID NO: 1663. In some embodiments, an isolated FN3 domain that binds CD71 comprises the amino acid sequence of SEQ ID NO: 1664. In some embodiments, an isolated FN3 domain that binds CD71 comprises the amino acid sequence of SEQ ID NO: 1665. In some embodiments, an isolated FN3 domain that binds CD71 comprises the amino acid sequence of SEQ ID NO: 1666. In some embodiments, an isolated FN3 domain that binds CD71 comprises the amino acid sequence of SEQ ID NO: 1667. In some embodiments, an isolated FN3 domain that binds CD71 comprises the amino acid sequence of SEQ ID NO: 1668. In some embodiments, an isolated FN3 domain that binds CD71 comprises the amino acid sequence of SEQ ID NO: 1669. In some embodiments, an isolated FN3 domain that binds CD71 comprises the amino acid sequence of SEQ ID NO: 1670. In some embodiments, an isolated FN3 domain that binds CD71 comprises the amino acid sequence of SEQ ID NO: 1671. In some embodiments, an isolated FN3 domain that binds CD71 comprises the amino acid sequence of SEQ ID NO: 1672. In some embodiments, an isolated FN3 domain that binds CD71 comprises the amino acid sequence of SEQ ID NO: 1673. In some embodiments, an isolated FN3 domain that binds CD71 comprises the amino acid sequence of SEQ ID NO: 1674. In some embodiments, an isolated FN3 domain that binds CD71 comprises the amino acid sequence of SEQ ID NO: 1675. In some embodiments, an isolated FN3 domain that binds CD71 comprises the amino acid sequence of SEQ ID NO: 1676. In some embodiments, an isolated FN3 domain that binds CD71 comprises the amino acid sequence of SEQ ID NO: 1677. In some embodiments, an isolated FN3 domain that binds CD71 comprises the amino acid sequence of SEQ ID NO: 1678. In some embodiments, an isolated FN3 domain that binds CD71 comprises the amino acid sequence of SEQ ID NO: 1679. In some embodiments, an isolated FN3 domain that binds CD71 comprises the amino acid sequence of SEQ ID NO: 1680. In some embodiments, an isolated FN3 domain that binds CD71 comprises the amino acid sequence of SEQ ID NO: 1681. In some embodiments, an isolated FN3 domain that binds CD71 comprises the amino acid sequence of SEQ ID NO: 1682. In some embodiments, an isolated FN3 domain that binds CD71 comprises the amino acid sequence of SEQ ID NO: 1683. In some embodiments, an isolated FN3 domain that binds CD71 comprises the amino acid sequence of SEQ ID NO: 1684. In some embodiments, an isolated FN3 domain that binds CD71 comprises the amino acid sequence of SEQ ID NO: 1685. In some embodiments, an isolated FN3 domain that binds CD71 comprises the amino acid sequence of SEQ ID NO: 1686. In some embodiments, an isolated FN3 domain that binds CD71 comprises the amino acid sequence of SEQ ID NO: 1687. In some embodiments, an isolated FN3 domain that binds CD71 comprises the amino acid sequence of SEQ ID NO: 1688. In some embodiments, an isolated FN3 domain that binds CD71 comprises the amino acid sequence of SEQ ID NO: 1689. In some embodiments, an isolated FN3 domain that binds CD71 comprises the amino acid sequence of SEQ ID NO: 1690. In some embodiments, an isolated FN3 domain that binds CD71 comprises the amino acid sequence of SEQ ID NO: 1691. In some embodiments, an isolated FN3 domain that binds CD71 comprises the amino acid sequence of SEQ ID NO: 1692. In some embodiments, an isolated FN3 domain that binds CD71 comprises the amino acid sequence of SEQ ID NO: 1693. In some embodiments, an isolated FN3 domain that binds CD71 comprises the amino acid sequence of SEQ ID NO: 1694. In some embodiments, an isolated FN3 domain that binds CD71 comprises the amino acid sequence of SEQ ID NO: 1695. In some embodiments, an isolated FN3 domain that binds CD71 comprises the amino acid sequence of SEQ ID NO: 1696. In some embodiments, an isolated FN3 domain that binds CD71 comprises the amino acid sequence of SEQ ID NO: 1697. In some embodiments, an isolated FN3 domain that binds CD71 comprises the amino acid sequence of SEQ ID NO: 1698. In some embodiments, an isolated FN3 domain that binds CD71 comprises the amino acid sequence of SEQ ID NO: 1699. In some embodiments, an isolated FN3 domain that binds CD71 comprises the amino acid sequence of SEQ ID NO: 1700. In some embodiments, an isolated FN3 domain that binds CD71 comprises the amino acid sequence of SEQ ID NO: 1701. In some embodiments, an isolated FN3 domain that binds CD71 comprises the amino acid sequence of SEQ ID NO: 1702. In some embodiments, an isolated FN3 domain that binds CD71 comprises the amino acid sequence of SEQ ID NO: 1703. In some embodiments, an isolated FN3 domain that binds CD71 comprises the amino acid sequence of SEQ ID NO: 1704. In some embodiments, an isolated FN3 domain that binds CD71 comprises the amino acid sequence of SEQ ID NO: 1705. In some embodiments, an isolated FN3 domain that binds CD71 comprises the amino acid sequence of SEQ ID NO: 1706. In some embodiments, an isolated FN3 domain that binds CD71 comprises the amino acid sequence of SEQ ID NO: 1707. In some embodiments, an isolated FN3 domain that binds CD71 comprises the amino acid sequence of SEQ ID NO: 1708. In some embodiments, an isolated FN3 domain that binds CD71 comprises the amino acid sequence of SEQ ID NO: 1709. In some embodiments, an isolated FN3 domain that binds CD71 comprises the amino acid sequence of SEQ ID NO: 1710. In some embodiments, an isolated FN3 domain that binds CD71 comprises the amino acid sequence of SEQ ID NO: 1711. In some embodiments, an isolated FN3 domain that binds CD71 comprises the amino acid sequence of SEQ ID NO: 1712. In some embodiments, an isolated FN3 domain that binds CD71 comprises the amino acid sequence of SEQ ID NO: 1713. In some embodiments, an isolated FN3 domain that binds CD71 comprises the amino acid sequence of SEQ ID NO: 1714. In some embodiments, an isolated FN3 domain that binds CD71 comprises the amino acid sequence of SEQ ID NO: 1715. In some embodiments, an isolated FN3 domain that binds CD71 comprises the amino acid sequence of SEQ ID NO: 1716. In some embodiments, an isolated FN3 domain that binds CD71 comprises the amino acid sequence of SEQ ID NO: 1717. In some embodiments, an isolated FN3 domain that binds CD71 comprises the amino acid sequence of SEQ ID NO: 1718. In some embodiments, an isolated FN3 domain that binds CD71 comprises the amino acid sequence of SEQ ID NO: 1719. In some embodiments, an isolated FN3 domain that binds CD71 comprises the amino acid sequence of SEQ ID NO: 1720. In some embodiments, an isolated FN3 domain that binds CD71 comprises the amino acid sequence of SEQ ID NO: 1721. In some embodiments, an isolated FN3 domain that binds CD71 comprises the amino acid sequence of SEQ ID NO: 1722. In some embodiments, an isolated FN3 domain that binds CD71 comprises the amino acid sequence of SEQ ID NO: 1723. In some embodiments, an isolated FN3 domain that binds CD71 comprises the amino acid sequence of SEQ ID NO: 1724. In some embodiments, an isolated FN3 domain that binds CD71 comprises the amino acid sequence of SEQ ID NO: 1725. In some embodiments, an isolated FN3 domain that binds CD71 comprises the amino acid sequence of SEQ ID NO: 1726. In some embodiments, an isolated FN3 domain that binds CD71 comprises the amino acid sequence of SEQ ID NO: 1727. In some embodiments, an isolated FN3 domain that binds CD71 comprises the amino acid sequence of SEQ ID NO: 1728. In some embodiments, an isolated FN3 domain that binds CD71 comprises the amino acid sequence of SEQ ID NO: 1729. In some embodiments, an isolated FN3 domain that binds CD71 comprises the amino acid sequence of SEQ ID NO: 1730. In some embodiments, an isolated FN3 domain that binds CD71 comprises the amino acid sequence of SEQ ID NO: 1731. In some embodiments, an isolated FN3 domain that binds CD71 comprises the amino acid sequence of SEQ ID NO: 1732. In some embodiments, an isolated FN3 domain that binds CD71 comprises the amino acid sequence of SEQ ID NO: 1733. In some embodiments, an isolated FN3 domain that binds CD71 comprises the amino acid sequence of SEQ ID NO: 1734. In some embodiments, an isolated FN3 domain that binds CD71 comprises the amino acid sequence of SEQ ID NO: 1735. In some embodiments, an isolated FN3 domain that binds CD71 comprises the amino acid sequence of SEQ ID NO: 1736. In some embodiments, an isolated FN3 domain that binds CD71 comprises the amino acid sequence of SEQ ID NO: 1737. In some embodiments, an isolated FN3 domain that binds CD71 comprises the amino acid sequence of SEQ ID NO: 1738. In some embodiments, an isolated FN3 domain that binds CD71 comprises the amino acid sequence of SEQ ID NO: 1739. In some embodiments, an isolated FN3 domain that binds CD71 comprises the amino acid sequence of SEQ ID NO: 1740. In some embodiments, an isolated FN3 domain that binds CD71 comprises the amino acid sequence of SEQ ID NO: 1741. In some embodiments, an isolated FN3 domain that binds CD71 comprises the amino acid sequence of SEQ ID NO: 1742. In some embodiments, an isolated FN3 domain that binds CD71 comprises the amino acid sequence of SEQ ID NO: 1743. In some embodiments, an isolated FN3 domain that binds CD71 comprises the amino acid sequence of SEQ ID NO: 1744. In some embodiments, an isolated FN3 domain that binds CD71 comprises the amino acid sequence of SEQ ID NO: 1745. In some embodiments, an isolated FN3 domain that binds CD71 comprises the amino acid sequence of SEQ ID NO: 1746. In some embodiments, an isolated FN3 domain that binds CD71 comprises the amino acid sequence of SEQ ID NO: 1747. In some embodiments, an isolated FN3 domain that binds CD71 comprises the amino acid sequence of SEQ ID NO: 1748. In some embodiments, an isolated FN3 domain that binds CD71 comprises the amino acid sequence of SEQ ID NO: 1749. In some embodiments, an isolated FN3 domain that binds CD71 comprises the amino acid sequence of SEQ ID NO: 1750. In some embodiments, an isolated FN3 domain that binds CD71 comprises the amino acid sequence of SEQ ID NO: 1751. In some embodiments, an isolated FN3 domain that binds CD71 comprises the amino acid sequence of SEQ ID NO: 1752. In some embodiments, an isolated FN3 domain that binds CD71 comprises the amino acid sequence of SEQ ID NO: 1753. In some embodiments, an isolated FN3 domain that binds CD71 comprises the amino acid sequence of SEQ ID NO: 1754. In some embodiments, an isolated FN3 domain that binds CD71 comprises the amino acid sequence of SEQ ID NO: 1755. In some embodiments, an isolated FN3 domain that binds CD71 comprises the amino acid sequence of SEQ ID NO: 1756. In some embodiments, an isolated FN3 domain that binds CD71 comprises the amino acid sequence of SEQ ID NO: 1757. In some embodiments, an isolated FN3 domain that binds CD71 comprises the amino acid sequence of SEQ ID NO: 1758. In some embodiments, an isolated FN3 domain that binds CD71 comprises the amino acid sequence of SEQ ID NO: 1759. In some embodiments, an isolated FN3 domain that binds CD71 comprises the amino acid sequence of SEQ ID NO: 1760. In some embodiments, an isolated FN3 domain that binds CD71 comprises the amino acid sequence of SEQ ID NO: 1761. In some embodiments, an isolated FN3 domain that binds CD71 comprises the amino acid sequence of SEQ ID NO: 1762. In some embodiments, an isolated FN3 domain that binds CD71 comprises the amino acid sequence of SEQ ID NO: 1763. In some embodiments, an isolated FN3 domain that binds CD71 comprises the amino acid sequence of SEQ ID NO: 1764. In some embodiments, an isolated FN3 domain that binds CD71 comprises the amino acid sequence of SEQ ID NO: 1765. In some embodiments, an isolated FN3 domain that binds CD71 comprises the amino acid sequence of SEQ ID NO: 1766. In some embodiments, an isolated FN3 domain that binds CD71 comprises the amino acid sequence of SEQ ID NO: 1767. In some embodiments, an isolated FN3 domain that binds CD71 comprises the amino acid sequence of SEQ ID NO: 1768. In some embodiments, an isolated FN3 domain that binds CD71 comprises the amino acid sequence of SEQ ID NO: 1769. In some embodiments, an isolated FN3 domain that binds CD71 comprises the amino acid sequence of SEQ ID NO: 1770. In some embodiments, an isolated FN3 domain that binds CD71 comprises the amino acid sequence of SEQ ID NO: 1771. In some embodiments, an isolated FN3 domain that binds CD71 comprises the amino acid sequence of SEQ ID NO: 1772. In some embodiments, an isolated FN3 domain that binds CD71 comprises the amino acid sequence of SEQ ID NO: 1773. In some embodiments, an isolated FN3 domain that binds CD71 comprises the amino acid sequence of SEQ ID NO: 1774. In some embodiments, an isolated FN3 domain that binds CD71 comprises the amino acid sequence of SEQ ID NO: 1775. In some embodiments, an isolated FN3 domain that binds CD71 comprises the amino acid sequence of SEQ ID NO: 1776. In some embodiments, an isolated FN3 domain that binds CD71 comprises the amino acid sequence of SEQ ID NO: 1777. In some embodiments, an isolated FN3 domain that binds CD71 comprises the amino acid sequence of SEQ ID NO: 1778. In some embodiments, an isolated FN3 domain that binds CD71 comprises the amino acid sequence of SEQ ID NO: 1779. In some embodiments, an isolated FN3 domain that binds CD71 comprises the amino acid sequence of SEQ ID NO: 1780. In some embodiments, an isolated FN3 domain that binds CD71 comprises the amino acid sequence of SEQ ID NO: 1781. In some embodiments, an isolated FN3 domain that binds CD71 comprises the amino acid sequence of SEQ ID NO: 1782. In some embodiments, an isolated FN3 domain that binds CD71 comprises the amino acid sequence of SEQ ID NO: 1783. In some embodiments, an isolated FN3 domain that binds CD71 comprises the amino acid sequence of SEQ ID NO: 1784. In some embodiments, an isolated FN3 domain that binds CD71 comprises the amino acid sequence of SEQ ID NO: 1785. In some embodiments, an isolated FN3 domain that binds CD71 comprises the amino acid sequence of SEQ ID NO: 1786. In some embodiments, an isolated FN3 domain that binds CD71 comprises the amino acid sequence of SEQ ID NO: 1787. In some embodiments, an isolated FN3 domain that binds CD71 comprises the amino acid sequence of SEQ ID NO: 1788. In some embodiments, an isolated FN3 domain that binds CD71 comprises the amino acid sequence of SEQ ID NO: 1789. In some embodiments, an isolated FN3 domain that binds CD71 comprises the amino acid sequence of SEQ ID NO: 1790. In some embodiments, an isolated FN3 domain that binds CD71 comprises the amino acid sequence of SEQ ID NO: 1791. In some embodiments, an isolated FN3 domain that binds CD71 comprises the amino acid sequence of SEQ ID NO: 1792. In some embodiments, an isolated FN3 domain that binds CD71 comprises the amino acid sequence of SEQ ID NO: 1793. In some embodiments, an isolated FN3 domain that binds CD71 comprises the amino acid sequence of SEQ ID NO: 1794. In some embodiments, an isolated FN3 domain that binds CD71 comprises the amino acid sequence of SEQ ID NO: 1795. In some embodiments, an isolated FN3 domain that binds CD71 comprises the amino acid sequence of SEQ ID NO: 1796. In some embodiments, an isolated FN3 domain that binds CD71 comprises the amino acid sequence of SEQ ID NO: 1797. In some embodiments, an isolated FN3 domain that binds CD71 comprises the amino acid sequence of SEQ ID NO: 1798. In some embodiments, an isolated FN3 domain that binds CD71 comprises the amino acid sequence of SEQ ID NO: 1799. In some embodiments, an isolated FN3 domain that binds CD71 comprises the amino acid sequence of SEQ ID NO: 1800. In some embodiments, an isolated FN3 domain that binds CD71 comprises the amino acid sequence of SEQ ID NO: 1801. In some embodiments, an isolated FN3 domain that binds CD71 comprises the amino acid sequence of SEQ ID NO: 1802. In some embodiments, an isolated FN3 domain that binds CD71 comprises the amino acid sequence of SEQ ID NO: 1803. In some embodiments, an isolated FN3 domain that binds CD71 comprises the amino acid sequence of SEQ ID NO: 1804. In some embodiments, an isolated FN3 domain that binds CD71 comprises the amino acid sequence of SEQ ID NO: 1805. In some embodiments, an isolated FN3 domain that binds CD71 comprises the amino acid sequence of SEQ ID NO: 1806. In some embodiments, an isolated FN3 domain that binds CD71 comprises the amino acid sequence of SEQ ID NO: 1807. In some embodiments, an isolated FN3 domain that binds CD71 comprises the amino acid sequence of SEQ ID NO: 1808. In some embodiments, an isolated FN3 domain that binds CD71 comprises the amino acid sequence of SEQ ID NO: 1809. In some embodiments, an isolated FN3 domain that binds CD71 comprises the amino acid sequence of SEQ ID NO: 1810. In some embodiments, an isolated FN3 domain that binds CD71 comprises the amino acid sequence of SEQ ID NO: 1811. In some embodiments, an isolated FN3 domain that binds CD71 comprises the amino acid sequence of SEQ ID NO: 1812. In some embodiments, an isolated FN3 domain that binds CD71 comprises the amino acid sequence of SEQ ID NO: 1813. In some embodiments, an isolated FN3 domain that binds CD71 comprises the amino acid sequence of SEQ ID NO: 1814. In some embodiments, an isolated FN3 domain that binds CD71 comprises the amino acid sequence of SEQ ID NO: 1815. In some embodiments, an isolated FN3 domain that binds CD71 comprises the amino acid sequence of SEQ ID NO: 1816. In some embodiments, an isolated FN3 domain that binds CD71 comprises the amino acid sequence of SEQ ID NO: 1817. In some embodiments, an isolated FN3 domain that binds CD71 comprises the amino acid sequence of SEQ ID NO: 1818. In some embodiments, an isolated FN3 domain that binds CD71 comprises the amino acid sequence of SEQ ID NO: 1819. In some embodiments, an isolated FN3 domain that binds CD71 comprises the amino acid sequence of SEQ ID NO: 1820. In some embodiments, an isolated FN3 domain that binds CD71 comprises the amino acid sequence of SEQ ID NO: 1821. In some embodiments, an isolated FN3 domain that binds CD71 comprises the amino acid sequence of SEQ ID NO: 1822. In some embodiments, an isolated FN3 domain that binds CD71 comprises the amino acid sequence of SEQ ID NO: 1823. In some embodiments, an isolated FN3 domain that binds CD71 comprises the amino acid sequence of SEQ ID NO: 1824. In some embodiments, an isolated FN3 domain that binds CD71 comprises the amino acid sequence of SEQ ID NO: 1825. In some embodiments, an isolated FN3 domain that binds CD71 comprises the amino acid sequence of SEQ ID NO: 1826. In some embodiments, an isolated FN3 domain that binds CD71 comprises the amino acid sequence of SEQ ID NO: 1827. In some embodiments, an isolated FN3 domain that binds CD71 comprises the amino acid sequence of SEQ ID NO: 1828. In some embodiments, an isolated FN3 domain that binds CD71 comprises the amino acid sequence of SEQ ID NO: 1829. In some embodiments, an isolated FN3 domain that binds CD71 comprises the amino acid sequence of SEQ ID NO: 1830. In some embodiments, an isolated FN3 domain that binds CD71 comprises the amino acid sequence of SEQ ID NO: 1831. In some embodiments, an isolated FN3 domain that binds CD71 comprises the amino acid sequence of SEQ ID NO: 1832. In some embodiments, an isolated FN3 domain that binds CD71 comprises the amino acid sequence of SEQ ID NO: 1833. In some embodiments, an isolated FN3 domain that binds CD71 comprises the amino acid sequence of SEQ ID NO: 1834. In some embodiments, an isolated FN3 domain that binds CD71 comprises the amino acid sequence of SEQ ID NO: 1835. In some embodiments, an isolated FN3 domain that binds CD71 comprises the amino acid sequence of SEQ ID NO: 1836. In some embodiments, an isolated FN3 domain that binds CD71 comprises the amino acid sequence of SEQ ID NO: 1837. In some embodiments, an isolated FN3 domain that binds CD71 comprises the amino acid sequence of SEQ ID NO: 1838. In some embodiments, an isolated FN3 domain that binds CD71 comprises the amino acid sequence of SEQ ID NO: 1839. In some embodiments, an isolated FN3 domain that binds CD71 comprises the amino acid sequence of SEQ ID NO: 1840. In some embodiments, an isolated FN3 domain that binds CD71 comprises the amino acid sequence of SEQ ID NO: 1841. In some embodiments, an isolated FN3 domain that binds CD71 comprises the amino acid sequence of SEQ ID NO: 1842. In some embodiments, an isolated FN3 domain that binds CD71 comprises the amino acid sequence of SEQ ID NO: 1843. In some embodiments, an isolated FN3 domain that binds CD71 comprises the amino acid sequence of SEQ ID NO: 1844. In some embodiments, an isolated FN3 domain that binds CD71 comprises the amino acid sequence of SEQ ID NO: 1845. In some embodiments, an isolated FN3 domain that binds CD71 comprises the amino acid sequence of SEQ ID NO: 1846. In some embodiments, an isolated FN3 domain that binds CD71 comprises the amino acid sequence of SEQ ID NO: 1847. In some embodiments, an isolated FN3 domain that binds CD71 comprises the amino acid sequence of SEQ ID NO: 1848. In some embodiments, an isolated FN3 domain that binds CD71 comprises the amino acid sequence of SEQ ID NO: 1849.

[0299] In some embodiments, the isolated FN3 domain that binds CD71 comprises an initiator methionine (Met) linked to the N-terminus of the molecule.

[0300] In some embodiments, the isolated FN3 domain that binds CD71 comprises an amino acid sequence that is 62%, 63%, 64%, 65%, 66%, 67%, 68%, 69%, 70%, 71%, 72%, 73%, 74%, 75%, 76%, 77%, 78%, 79%, 80%, 81%, 82%, 83%, 84%, 85%, 86%, 87%, 88%, 89%, 90%, 91%, 92%, 93%, 94%, 95%, 96%, 97%, 98% or 99% identical to one of the amino acid sequences of SEQ ID NOs: 365-644, 663-672, or 1395-1849. Percent identity can be determined using the default parameters to align two sequences using BlastP available through the NCBI website. The sequences of the FN3 domains that bind to CD71 can be found, for example, in Table 9. These sequences are illustrated with a N-terminal methionine. The sequence of the domain can also be utilized without the N-terminal methionine. Simply for the avoidance of duplicating almost identical sequences, a table of such sequences is not being provided, but one of skill in the art could immediately envisage the sequences provided for herein without the N-terminal methionine and the disclosure should be understood and construed to include such sequences.

TABLE 9
CD71-binding FN3 Domain Sequences

| SEQ ID | |
|---|---|
| NO: | SEQUENCE |
| 365 | MLPAPKNLVVSRVTEDSARLSWTAPDAAFDSFPITYIEAVVLGEAIVLTVPGS |
| | ERSYDLTGLKPGTEYPVGISGVKGGHNSMPLSAIFTT |
| 366 | MLPAPKNLVVSEVTEDSARLSWQGVARAFDSFMINYSELFWMGEAIVLTVPGS |
| | ERSYDLTGLKPGTEYVVRIKGVKGGKGSWPLHAHFTT |
| 367 | MLPAPKNLVVSRVTEDSARLSWTAPDAAFDSFNIEYAETRWYGEAIVLTVPGS |
| | ERSYDLTGLKPGTEYVVPIDGVKGGIASKPLSAIFTT |
| 368 | MLPAPKNLVVSEVTEDSARLSWQGVARAFDSFLITYRDQIFAGEVIVLTVPGS |
| | ERSYDLTGLKPGTEYPVWIQGVKGGSPSAPLSAESTT |
| 369 | MLPAPKNLVVSEVTEDSARLSWQGVARAFDSFLITYREQIFAGEVIVLTVPGS |
| | ERSYDLTGLKPGTEYWVYIWGVKGGKPSFPLRAGFTT |
| 370 | MLPAPKNLVVSRVTEDSARLSWTAPDAAFDSFPIIYMETFSRGEAIVLTVPGS |
| | ERSYDLTGLKPGTEYRVPIGGVKGGSSSCPLSAIFTT |
| 371 | MLPAPKNLVVSDVTEDSARLSWQGVARAFDSFLITYREQIFAGEVIVLTVPGS |
| | ERSYDLTGLKPGTEYPVWIQGVKGGSPSAPLSAEFTT |
| 372 | MLPAPKNLVVSRVTEDSARLSWTAPDAAFDSFKIAYIETATRGEAIVLTVPGS |
| | ERSYDLTGLKPGTEYVVPIPGVKGGNTSSPLSAIFTT |
| 373 | MLPAPKNLVVSRVTEDSARLSWTAPDAAFDSFFIPYAEPSPTGEAIVLTVPGS |
| | ERSYDLTGLKPGTEYSVLIHGVKGGHLSDPLSAISTT |
| 374 | MLPAPKNLVVSRVTEDSARLSWTAPDAAFDSFLIAYPEDGFRGEAIVLTVPGS |
| | ERSYDLTGLKPGTEYPVPILGVKGGGGSGPLSAIFTT |
| 375 | MLPAPKNLVVSRVTEDSARLSWTAPDAAFDSFPIYYVENVVWGEAIVLTVPGS |
| | ERSYDLTGLKPGTEYWEVIIGVKGGQCSRPLSAIFTT |
| 376 | MLPAPKNLVVSRVTEDSARLSWQGVARAFDSFLITYREQIFAGEVIVLTVPGS |
| | ERSYDLTGLKPGTECPVWIQGVKGGSPSAPLSAEFTT |
| 377 | MLPAPKNLVVSRVTEDSARLSWTAPDAAFDSFGIAYREFRPSGEAIVLTVPGS |
| | ERSYDLIVETGYRNEVVICGVKGGPWSGPLSAIFTT |
| 378 | MLPAPKNLVVSRVTEDSARLSWTAPDAAFDSFPILYTECVYRGEAIVLTVPGS |
| | ERSYDLTGLKPGTEYHVPITGVKGGGGSWPLSAIFTT |
| 379 | MLPAPKNLVVSRVTEDSARLSWTAPDAAFDSFNIMYHEIIYVGEAIVLTVPGS |
| | ERSYDLTGLKPGTEYPVPIEGVKGGGISGPLSAIFTT |
| 380 | MLPAPKNLVVSRVTEDSARLSWTAPDAAFDSFAITYTEAALCGEAIVLTVPGS |
| | ERSYDLTGLKPGTEYPVPINGVKGGGTSGPLSAIFTT |
| 381 | MLPAPKNLVVARVTEDSARLSWTAPDAAIDSFPIDYSEYWWGGEAIVLTVPGS |
| | ERSYDLTGLKPGTEYPVLITGVKGGYRSGPLSAIFTT |
| 382 | MLPAPKNLVVSRVTEDSARLSWTAPDAAFDSFSIRYNEFIVAGEAIVLTVPGS |
| | ERSYDLTGLKPGTEYDVPIAGVKGGGASWPLSAIVTT |
| 383 | MLPAPKNLVVSRVTEDSARLSWTAPDAAFDSFWYLELQFAGEAIVLTVPGSER |
| | SYDLTGLKPGTEYNVPITGVKGGIISFPLSAIFTT |
| 384 | MLPAPKNLVVSRVTEDSARLSWTAPDAAFDSFAIWYHEWYGDGEAIVLTVPGS |
| | ERSYDLTGPKPGTEYRVRISGVKGGFESGPLSAIFTT |
| 385 | MLPAPKNLVVSRVTEDSARLSWTAPDAAFDSFMIRYQEGTRWGEAIVLTVPGS |
| | ERSYDLTGLKPGTEYIVMIAGVKGGQISLPLSAIFTT |
| 386 | MLPAPKNLVVSRVTEDSARLSWTAPDAAFDSFPIWYLEKSYQGEAIVLTVPGS |
| | ERSYDLTGLKPGTEYVVPIIGVKGGRDSCPLSAIFTT |
| 387 | MLPAPKNLVVSEVTEDSARLSWQGVARAFDSFLITYREQIFAGEVIVLTVPGS |
| | ERSYDLTGLKPGTEYPVWIQGVKGGSPSAPLSAEFTT |
| 388 | MLPAPKNLVVSRVTEDSARLSWTAPDAAFDSFRISYAETVRQGEAIVLTVPGS |
| | ERSYDLTVETGYRNWVMILGVKGGPGSLPLSAIFTT |
| 389 | MLPAPKNLVVSEVTEDSARLSWQGVVRAFDSFLITYREQIFAGEVIVLTVPGS |
| | ERSYDLTGLKPGTEYPVWIQGVKGGSPSAPLSAEFTT |
| 390 | MLPAPKNLVVSRVTEDSARLSWTAPDAAFDSFWIEYWEAVGFGEAIVLTVPGS |
| | ERSYDLTGLKPGTEYFVGIYGVKGGYLSAPLSAIFTT |
| 391 | MLPAPKNLVVSRVTEDSARLSWTAPDAAFDSFIIHYVEQQLIGEAIVLTVPGS |
| | ERSYDLTGLKPGTEYPVPITGVKGGACSWPLSAIFTT |
| 392 | MLPAPKNLVVSRVTEDSARLSWTAPDAAFDSFTIEYSEHPIDGEAIPLFVPGS |
| | ERSYDLTGLKPGTEYYVRIHGVKGGWFSHPLWAFFTT |
| 393 | MLPAPKNLVVSRVTEDSARLSWQGVARAFDSFLITYREQIFAGEVIVLTVPGS |
| | ERSYDLTGLKPGTEYGVTIAGVKGGWRSKPLNAESTT |
| 394 | MLPAPKNLVVSRVTEDSARLSWTAPDAAFDSFGIAYVESYWYGEAIVLTVPGS |
| | ERSYDLTGLKPGTEYNVPIYGVKGGDGSGPLSAIFTT |
| 395 | MLPAPKNLVVSRVTEDSARLSWTAPDAAFDSFYITYVELNLAGEAIVLTVPGS |
| | ERSYDLTGLKPGTEYPVPILGVKGGSLSQPLSAIFTT |
| 396 | MLPAPKNLVVSRVTEDSARLSWTAPDAAFDSFPISYIESIADGEAIVLTVPGS |
| | ERSYDLTGLKPGTEYWVAIVGVKGGPFSWSLSAIVTT |
| 397 | MLPAPKNLVVSEVTEDSARLSWQGVARAFDSFLITYREQIFAGEVIVPTVPGS |
| | ERSYDLTGLKPGTEYPVPIAGVKGGGPSAPLSAIFTT |
| 398 | MLPAPKNLVVSRVTEDSARLSWTTPDAAFDSFPIYYWEVTITGEAIYLSVPGS |
| | ERSYDLTGLKPGTEYPVDIPGVKGGAASPPLSAIFTT |
| 399 | MLPAPKNLVVSRVTEDSARLSWTAPDAAFDSFPILYLEHTVRSEAIVLTVPGS |
| | ERSYDLTDLKPGTEYCVPIDGVKGGLRSRPLSAIFTT |
| 400 | MLPAPKNLVVSRVTEDSARLSWTAPDAAFDSFPIPYTEPPDPGEAIVLTVPGS |
| | ERSYDLTGLKPGTEYLVTILGVKGGSMSVPLSAIFTT |
| 401 | MLPAPKNLVVSRVTEDSARLSWTAPDAAFDSFTIDYWENRCPGEAIVLTVPGS |
| | ERSYDLTGLKPGTEYCVWISGVKGGYSSWPLSAIFTT |
| 402 | MLPAPKNLVVSRVTEDSARLSWQGVARAFDSFLITYREQIFAGEVIVLTVPGS |
| | ERSYDLTGLKPGTEYPVWIQGVKGGHLSDPLSAIVTT |
| 403 | MLPAPKNLVVSRVTEDSARLSWTAPDAAFDSFLIPYAETSPSGEAIVLTVPGS |
| | ERSYDLTGLKPGTEYSVLIHGVKGGDYSEPLSAIFTT |
| 404 | MLPAPKNLVVSRVTEDSARLSWTAPDAAFDSFMIVYYEYTRFGEAIVLTVPGS |
| | ERSYDLTGLKPGTEYTVPIDGVKGGGRSSPLSAIFTT |
| 405 | MLPAPKNLVVSRVTEDSARLSWTAPDAAFDSFFIPYAEPSPTGEAIVLTVPGS |
| | ERSYDLTGLKPGTEYSVLIHGVKGGHLSDPLSAIVTT |
| 406 | MLPAPKNLVVSEVTEDSARLSWQGVARAFDSFLITYREQIFAGEVIVLTVPGS |
| | ERSYDLTGLKPGTEYPVWIQGVKGGSPSAPLSAEFTT |
| 407 | MLPAPKNLVVSRVTEDSARLSWTAPDAAFDSFIIPYAEVRPDGEAIVLTVPGS |
| | ERSYDLTGLKPGTEYSVLIHGVKGGKLSLPLSAIFTT |
| 408 | MLPAPKNLVVSRVTEDSARLSWTAPDAAFDSFGIVYLEMMVTGEAIVLTVPGS |
| | ERSYDLTGLKPGTEYDVPILGVKGGTRSVPLSAIFTT |
| 409 | MLPAPKNLVVSRVTEDSARLSWTAPDAAFDSFLIYYEEGYLEYYYSGEAIVLT |
| | VPGSERSYDLTGLKPGTEYYVGIVGVKGGGLSGPLSAISTT |
| 410 | MLPAPKNLVVSRVTEDSARLSWTAPDAAFDSEPIAYAEPRPDGEAIVLTVPGS |
| | ERSYDLTGLKPGTEYSVLIHGVKGGDWSLPLSAIFTT |
| 411 | MSLPAPKNLVVSRVTEDSARLSWTAPDAAFDSFTIHYREFQLSGEAIVLIVPG |
| | SERSYDLTGLKPGTEYDVPIEGVKGGPGSRPLSAIFTT |
| 412 | MLPAPKNLVVSEVTEDSARLSWQGVARAFDSFLITYREQIFAGEVIVLTVPGS |
| | ECSYDLTGLKPGTEYPVWIQGVKGGSPSAPLSAEFTT |
| 413 | MLPAPKNLVVSRVTEDSARLSWTAPDAAFDSFEIDYDELAIYGEAIVLTVPGS |
| | ERSYDLTGLKPGTEYGVRIPGVKGGMPSLPLSAIVTT |
| 414 | MLPAPENLVVSEVTEDSARLSWQGVARAFDSFLITYREQIFAGEVIVLTVPGS |
| | ERSYDLTGLKPGTEYPVWIQGVKGGSPSAPLSAESTT |
| 415 | MLPAPKNLVVSRVTEDSARLSWTAPDAAFDSFAIAYGEHIVIGEAIVLTVPGS |
| | ERSYDLTGLKPGTEYMVPIAGVKGGPISLPLSAIFTT |
| 416 | MLPAPKNLVVSRVTEDSARLSWTAPDAAFDSFFIPYAEPSPTGEAIVLTVPGS |
| | ERSYDLTGLKPGTEYSVLIHGVKGGHLSDPLSAIFTT |
| 417 | MLPAPKNLVVSRVTEDSARLSWTAPDAAFDSFSIGYVELVLLGEAIVLTVPGS |
| | ERSYDLTGLKPGTEYDVLIPGVKGGSLSRPLSAIFTT |
| 418 | MLPAPKNLVVSRVTEDSARLSWTAPDAAFDSFAIPYAELSRNGEAIVLTVPGS |
| | ERSYDLTGLKPGTEYTVLIHGVKGGCLSDPLSAIFTT |
| 419 | MLPAPKNLVVSRVTEDSARLSWTAPDAAFDSFHIEYLELSRHGEAIVLTVPGS |
| | ERSYDLTGLKPGTEYWVMIFGVKGGGPSKPLSAIFTT |
| 420 | MLPAPKNLVVSRVTEDSARLSWTAPDAAFDSFVYNEVHWIGEAIVLTVPGSER |
| | SYDLTGLKPGTEYFVGIYGVKGGHWSKPLSAIFTT |
| 421 | MLPAPKNLVVSRVTEDSARLSWTAPDAAFDSFEIDYDELAIYGEAIVLTVPGS |
| | ERSYDLTGLKPGTEYGVRIPGVKGGMPSLPLSAIVTT |
| 422 | MLPAPKNLVVSRVTEDSARLSWTAPDAAFDSFQIVYSELWIKGEAIVLTVPGS |
| | ERSYDLTGLKPGTEYQVPIPGVKGGRNSFPLSAIFTT |
| 423 | MLPAPKNLVVSRVTEDSARLSWTAPDAAFDSFKIRYTETRSIGEAIVLTVPGS |
| | ERSYDLTGLKPGTEYCVPIGGVKGGDSSWPLSAISTT |
| 424 | MLPAPKNLVVSRVTEDSARLSWTAPDAAFDSFCISYYERMGRGEAIVLTVPGS |
| | ERSYDLTGLKPGTEYMVYIFGVKGGLNSLPLSAIFTT |
| 425 | MLPAPKNLVVSRVTEDSARLSWTAPDAAFDSFYIVYAEPIPNGEAIVLTVPGS |
| | ERSYDLTGLKPGTEYSVLIHGVKGGRNSDPLSAIFTT |
| 426 | MLPAPKNLVVSRVTKDSARLSWTAPDAAFDSFPIAYAEPRPDGEAIVLTVPGS |
| | ERSYDLTGLKPGTEYSVLIHGVKGGLLSSPLSAIFTT |
| 427 | MLPAPKNLVVSRVTEDSARLSWTAPDAAFDSFTIDYDEPRSPGEAIVLTVPGS |
| | ERSYDLTGLKPGTEYRVFIWGIKGGDTSFPLSAIFTT |
| 428 | MLPAPKNLVVSRVTEDSARLSWTAPDAAFDSFTILYAEQAQFGEAIVLTVPGS |
| | ERSYDLTGLKPGTEYPITGVKGGTRSGPLSAISTT |
| 429 | MLPAPKNLVVSRVTEDSARLSWTAPDAAFDSFIIPYAEVRPDGEAIVLTVPGS |
| | ERSYDLTGLKPGTEYSVLIHGVKGGHLSDPLSAISTT |
| 430 | MLPAPKNLVVSRVTEDSARLSWTAPDAAFDSFHIAYEETATSGEAIYLRVPGS |
| | ERSYDLTGLKPGTEYGVEIEGVKGGARSRPLYADFTT |
| 431 | MLPAPKNLVVSRVTEDSARLSWQGVARAFDSFLITYREQIFAGEVIVLTVPGS |
| | ERSYDLTGLKPGTEYPVWIQGVKGGDLSNPLSAIFTT |
| 432 | MLPAPKNLVVSRVTEDSARLSWTAPDAAFDSFPISYLELSLYGEAIVLTVPGS |
| | ERSYDLTGLKPGTEYPVGIAGVKGGVVSRPLSAIFTT |
| 433 | MLPAPKNLVVSRVTEDSARLSWTAPDAAFDSFTIGYREWYWYGEAIVLTVPGS |
| | ERSYDLTGLKPGTEYNVPISGVKGGLDSFPLSAIFTT |
| 434 | MLPAPKNLVVSEVTEDSARLSWQGVARAFDSFLITYREQIFAGEVIVLTVPGS |
| | ERSYDLTGLKPGTEYPVWIQGVKGGSPSAPLSAESTT |
| 435 | MLPAPKNLVVSRVTEDSARLSWTAPDAAFDSFSITYLEWWNLGEAIVLTVPGS |
| | ERSYDLTGLKPGTEYMVTIPGVKGGMSSYPLSAIFTT |
| 436 | MLPAPKNLVVSRVTEDSARLSWTAPDAAFDSFTISYGEEALIGEAIYLRVPGS |
| | ERSYDLTGLKPGTEYYVHIEGVKGGSWSQPLAAAFTT |
| 437 | MLPAPKNLVVSRVTEDSARLSWTAPDAAFDSFTIEYYENIGIGEAIVLTVPGS |
| | ERSYDLTGLKPGTEYSVPIVGVKGGPYSHPLSAIFTT |
| 438 | MLPAPKNLVVSRVTEDSARLSWTAPDAAFDSFPIAYAEPRPDGEAIVLTVPGS |
| | ERSYDLTGLKPGTEYSVLIHGVKGGLLSSPLSAIFTT |
| 439 | MLPAPKNLVVSRVTEDSARLSWTAPDAAFDSFGIGYYEHKRFGEAIQLSVPGS |
| | ERSYDLTGLKPGTEYEVDIEGVKGGVLSWPLFAEFTT |
| 440 | MLPAPKNLVVSRVTEDSARLSWTAPDAAFDSFVIEYTERFWSGEAIVLTVPGS |
| | ERSYDLTGLKPGTEYSVPIDGVKGGQCSTPLSAIFTT |
| 441 | MLPAPKNLVVSRVTEDSARLSWTAPDAAFDSFWIDYEEEGVIGEAIYLHVPGS |
| | ERSYDLTGLKPGTEYVVKIHGVKGGHPSHPLVAVETT |
| 442 | MLPAPKNLVVSRVTEDSARLSWQGVARAFDSFLITYVELRHLGEAIVLTVPGS |
| | ERSYDLTGLKPGTEYPVWIQGVKGGSPSAPLSAEFTT |
| 443 | MLPAPKNLVVSRVTEDSARLSWTAPDAAFDSFLIPYAETSPSGEAIVLTVPGS |
| | ERSYDLTGLKPGTEYSVLIHGVKGGDYSSPLSAIFTT |
| 444 | MLPAPKNLVVSRVTEDSARLSWTAPDAAFDSFPIAYAEPRPDGEAIVLTVPGS |
| | ERSYDLTGLKPGTEYSVLIHGVKGGLLSSPLSAISTT |
| 445 | MLPAPKNLVVSRVTEDSARLSWQGVARAFDSFSILYLELTPKGEAIVLTVPGS |
| | ERSYDLTGLKPGTEYPVWIQGVKGGSPSAPLSAEFTT |
| 446 | MLPAPKNLVVSRVTEDSARLSWTAPDAAFDSFIIEYFEPIPIGEAIVLTVPGS |
| | ERSYDLTGLKPGTEYAVNIYGVKGGYLSHPLSAIFTT |
| 447 | MLPAPKNLVVSEVTEDSARLSWQGVARAFDSFLITYREQIFAGEVIVLTVPGS |
| | ECSYDLTGLKPGTEYPVWIQGVKGGSPSAPLSAEFTT |
| 448 | MLPAPKNLVVSRVTEDSARLSWTAPDAAFDSFAIEYTEFLYSGEAIVLTVPGS |
| | ERSYDLTGLKPGTEYGVPINGVKGGFVSPPLSAIVTT |
| 449 | MLPAPKNLVVSRVTEDSARLSWTAPDAAFDSFPIKYREVLRCGEAIVLTVPGS |
| | ERSYDLTGLKPGTEYTVPITGVKGGFGSSPLSAIFTT |
| 450 | MLPAPENLVVSRVTEDSARLSWTAPDAAFDSFWIEYYEGVIQGEAIVLTVPGS |
| | ERSYDLTGLKPGTEYFVAIWGVKGGKWSVPLSAIFTT |
| 451 | MLPAPKNLVVSRVTEDSARLSWQGVARAFDSFLITYREQIFAGEVIVLTVPGS |
| | ERSYDLTGLKPGTEYPVWIQGVKGGSPSAEFTT |
| 452 | MLPAPKNLVVSRVTEDSARLSWTAPDAAFDSFQIHYWETQGFGEAIVLTVPGS |
| | ERSYDLTGLKPGTEYPVLIPGVKGGPSSLPLSAIFTT |
| 453 | MLPAPKNLVVSRVTEDSARLSWTAPDAAFDSFFIPYAEPSPTGEAIVLTVPGS |
| | ERSYDLTGLKPGTEYSVLIHGVKGGHLSDPLSAIFTT |
| 454 | MLPAPKNLVVSRVTEDSARLSWTAPDAAFDSFAIEYYEPVPAGEAIYLDVPGS |
| | ERSYDLTGLKPGTEYDVTIYGVKGGYYSHPLFASFTT |
| 455 | MLPAPKNLVVSEVTEDSARLSWQGVARAFDSFLITYREQIFAGEVIVLTVPGS |
| | ERSYDLTGLKPGTEYPVWIQGVKGGSPSAPLSAIFTT |
| 456 | MLPAPKNLVVSEVTEDSARLSWQGVARAFDSFLITYREQIFAGEVIVLTVPGS |
| | ERSYDLTGLKPGTEYPVWIQGVKGGSPSAPLSAEFTT |
| 457 | MSLPAPKNLVVSRVTEDSARLSWTAPDAAFDSFPIAYLEVFYEGEAIVLTVPG |
| | SERSYDLTGLKPGTEYQVPIEGVKGGAMSLPLSAIFTT |
| 458 | MLPAPKNLVVSRVTEDSARLSWTAPDAAFDSFHIWYEEETTIGEAIYLHVPGS |
| | ERSYDLTGLKPGTEYEVHITGVKGGPYSRPLFANFTT |
| 459 | MLPAPKNLVVSRVTEDSARLSWTAPDAAFDSFGIAYDEWPEFGEAIVLTVPGS |
| | ERSYDLTGLKPDTEYIVEIYGVKGGWFSWPLSAIFTT |
| 460 | MLPAPKNLVVSRVTEDSARLSWTAPDAAFDSFFIPYAEPSPTGEAIVLTVPGS |
| | ERSYDLTGLKPGTEYSVLIHGVKGGHLSDPLSVIFTT |
| 461 | MLPAPKNLVVSRVTEDSARLSWTAPDAAFDSFYIWYEEVMYLGEAIVLTVPGS |
| | ERSYDLTGLKPGTEYNVPIPGVKGGHSSPPLSAIFTT |
| 462 | MLPAPKNLVVSRVTEDSARLSWTAPDAAFDSFHILYEELFLVGEAIVLTVPGS |
| | ERSYDLTGLKPGTEYKVPISGVKGGPVSRPLSAIFTT |
| 463 | MLPAPKNLVVSRVTEDSARLSWQGVARAFDSFLITYREQIFAGEVIVLTVPGS |
| | ERSYDLTGLKPGTEYPVWIQGVKGGSPSAPLSAEFTT |
| 464 | MLPAPKNLVVSRVTEDSARLSWTAPDAAFDSFHIVYHEPRPSGEAIWLHVPGS |
| | ERSYDLTGLKPGTEYEVGIVSVKGGDLSVPLVAFFTT |
| 465 | MLPAPKNLVVSRVTEDSARLSWTAPDAAFDSFYIAYAEPRPDGEAISLLVPGS |
| | ERSYDLTGLKPGTEYSVLIHGVKGGLLSSPLYAVETT |
| 466 | MLPAPKNLVVSRVTEDSARLSWTAPDAAFDSFYIAYAEPRPDGEAIFLVVPGS |
| | ERSYDLTGLKPGTEYSVLIHGVKGGLLSSPLHANFTT |
| 467 | MLPAPKNLVVSRVTEDSARLSWTAPDAAFDSFYIAYAEPRPDGEAILLDVPGS |
| | ERSYDLTGLKPGTEYSVLIHGVKGGLLSSPLYASFTT |
| 468 | MSLPAPKNLVVSRVTEDSARLSWTAPDAAFDSFYIAYAEPRPDGEAISLYVPG |
| | SERSYDLTGLKPGTEYSVLIHGVKGGLLSSPLSAISTT |
| 469 | MLPAPKNLVVSRVTEDSARLSWTAPDAAFDSFFIGYLEPQPPGEAIQLRVPGS |
| | ERSYDLTGLKPGTEYNVTIQGVKGGFPSMPLSAIFTT |
| 470 | MLPAPKNLVVSRVTEDSARLSWTAPDAAFDSFHISYEEDYTFGEAIYLRVPGS |
| | ERSYDLTGLKPGTEYRVVIGGVKGGWFSEPLLAAFTT |
| 471 | MLPAPKNLVVSRVTEDSARLSWTAPDAAFDSFFIGYLEPQPPGEAIYLTVPGS |
| | ERSYDLTGLKPGTEYNVTIQGVKGGFPSYPLDASFTT |
| 472 | MLPAPKNLVVSRVTEDSARLSWTAPDAAFDSFFIGYLEPQPPGEAIDLGVPGS |
| | ERSYDLTGLKPGTEYNVTIQGVKGGFPSMPLDPLEAYFTT |
| 473 | MLPAPKNLVVSRVTEDSARLSWTAPDAAFDSFYIAYAEPRPDGEAILLLVPGS |
| | ERSYDLTGLKPGTEYSVLIHGVKGGLLSSPLSAIFTT |
| 474 | MLPAPKNLVVSRVTEDSARLSWTAPDAAFDSFYIAYAEPRPDGEAINLQVPGS |
| | ERSYDLTGLKPGTEYSVLIHGVKGGLLSSPLVAFFTT |
| 475 | MLPAPKNLVVSRVTEDSARLSWTTPDAAFDSFFIGYLEPQPPGEAISLQVPGS |
| | ERSYDLTGLKPGTEYNVTIQGVKGGFPSSPLFAVETT |
| 476 | MLPAPKNLVVSRVTEDSARLSWTAPDAAFDSFYIAYAEPRPDGEAIELHVPGS |
| | ERSYDLTGLKPGTEYSVLIHGVKGGLLSSPLFTT |
| 477 | MLPAPKNLVVSRVTEDSARLSWTAPDAAFDSFYIAYAEPRPDGEAIQLVVPGS |
| | ERSYDLTGLKPGTEYSVLIHGVKGGLLSSPLSAIFTT |
| 478 | MLPAPKNLVVSRVTEDSARLSWTAPDAAFDSFYIAYAEPRPDGEAITLDVPGS |
| | ERSYDLTGLKPGTEYSVLIHGVKGGLLSSPLSAIFTT |
| 479 | MLPAPKNLVVSRVTEDSARLSWTAPDAAFDSFYIAYAEPRPDGEAIWLVVPGS |
| | ERSYDLTGLKPGTEYSVLIHGVKGGLLSSPLVASFTT |
| 480 | MLPAPKNLVVSRVTEDSARLSWTAPDAAFDSFYIAYAEPRPDGEAINLDVPGS |
| | ERSYDLTGLKPGTEYSVLIHGVKGGLLSSPLVAEFTT |
| 481 | MLPAPKNLVVSRVTEDSARLSWTAPDAAFDSFYIAYAEPRPDGEAIHLSVPGS |
| | ERSYDLTGLKPGTEYSVLIHGVKGGLLSSPLVAIFTT |
| 482 | MLPAPKNLVVSRVTEDSARLSWTAPDAAFDSFFIGYLEPQPPGEAIALWVPGS |
| | ERSYDLTGLKPGTEYNVTIQGVKGGFPSMPLSAIFTT |
| 483 | MLPAPKNLVVSRVTEDSARLSWTAPDAAFDSFYIAYAEPRPDGEAIILVVPGS |
| | ERSYDLTGLKPGTEYSVLIHGVKGGLLSSPLSAHFTT |
| 484 | MLPAPKNLVVSRVTEDSARLSWTAPDAAFDSFFIGYLEPQPPGEAIQLWVPGS |
| | ERSYDLTGLKPGTEYNVTIQGVKGGFPSHPLGAVETT |
| 485 | MLPAPKNLVVSRVTEDSARLSWTAPDAAFDSFYIAYAEPRPDGEAIQLHVPGS |
| | ERSYDLTGLKPGTEYSVLIHGVKGGLLSSPLLASFTT |
| 486 | MLPAPKNLVVSRVTEDSARLSWTAPDAAFDSFYIAYAEPRPDGEAIALHVPGS |
| | ERSYDLTGLKPGTEYSVLIHGVKGGLLSSPLVAFFTT |
| 487 | MLPAPKNLVVSRVTEDSARLSWTAPDAAFDSFFIGYLEPQPPGEAIHLHVPGS |
| | ERSYDLTGLKPGTEYNVTIQGVKGGFPSIPLHANFTT |
| 488 | MLPAPKNLVVSRVTEDSARLSWTAPDAAFDSFYIAYAEPRPDGEAIFLGVPGS |
| | ERSYDLTGLKPGTEYSVLIHGVKGGLLSSPLSAIFTT |
| 489 | MLPAPKNLVVSRVTEDSARLSWTAPDAAFDSFYIAYAEPRPDGEAIVLRVPGS |
| | ERSYDLTGLKPGTEYSVLIHGVKGGLLSSPLIASFTT |
| 490 | MLPAPKNLVVSRVTEDSARLSWTAPDAAFDSFYIAYAEPRPDGEAINLWVPGS |
| | ERSYDLTGLKPGTEYSVLIHGVKGGLLSSPLDASFTT |
| 491 | MLPAPKNLVVSRVTEDSARLSWTAPDAAFDSFVIEYFEWTLNGEAIVLTVPGS |
| | ERSYDLTGLKPGTEYSVQIYGVKGGCLSRPLSAIFTT |
| 492 | MLPAPKNLVVSRVTEDSARLSWTAPDAAFDSFYIAYAEPRPDGEAIHLWVPGS |
| | ERSYDLTGLKPGTEYSVLIHGVKGGLLSSPLIAHFTT |
| 493 | MLPAPKNLVVSRVTEDSARLSWTAPDAAFDSFFIPYAEPSPTGEAIVLTVPGS |
| | ERSYDLTGLKPGTEYSVLIHGVKGGLLSSPLSAHFTT |
| 494 | MLPAPKNLVVSRVTEDSARLSWTAPDAAFDSFYIAYAEPRPDGEAIYLYVPGS |
| | ERSYDLTGLKPGTEYSVLIHGVKGGLLSSPLDAFFTT |
| 495 | MLPAPKNLVVSRVTEDSARLSWTAPDAAFDSFYIAYAEPRPDGEAIGLQVPGS |
| | ERSYDLTGLKPGTEYSVLIHGVKGGLLSSPLSAIFTT |
| 496 | MLPAPKNLVVSRVTEDSARLSWTAPDAAFDSFYIAYAEPRPDGEAIQLAVPGS |
| | ERSYDLTGLKPGTEYSVLIHGVKGGLLSSPLHAFFTT |
| 497 | MLPAPKNLVVSRVTEDSARLSWTAPDAAFDSFFIGYLEPQPPGEAIWLHVPGS |
| | ERSYDLTGLKPGTEYNVTIQGVKGGFPSIPLIAIFTT |
| 498 | MLPAPKNLVVSRVTEDSARLSWTAPDAAFDSFYIAYAEPRPDGEAIVLDVPGS |
| | ERSYDLTGLKPGTEYSVLIHGVKGGLLSSPLVAEFTT |
| 499 | MLPTPKNLVVSRVTEDSARLSWTAPDAAFDSFYIAYAEPRPDGEAIQLRVPGS |
| | ERSYDLTGLKPGTEYSVLIHGVKGGLLSSPLHASFTT |
| 500 | MLPAPKNLVVSRVTEDSARLSWTAPDAAFDSFFIGYLEPQPPGEAIQLGVPGS |
| | ERSYDLTGLKPGTEYNVTIQGVKGGFPSHPLNANFTT |
| 501 | MLPAPKNLVVSRVTEDSARLSWTAPDAAFDSFFIGYLEPQPPGEAIQLEVPGS |
| | ERSYDLTGLKPGTEYNVTIQGVKGGFPSMPLSAIFTT |
| 502 | MLPAPKNLVVSRVTEDSARLSWTAPDAAFDSFYIAYAEPRPDGEAIFLGVPGS |
| | ERSYDLTGLKPGTEYSVLIHGVKGGLLSSPLIAFFTT |
| 503 | MLPAPKNLVVSRVTEDSARLSWTAPDAAFDSFFIGYLEPQPPGEAIGLQVPGS |
| | ERSYDLTGLKPGTEYNVTIQGVKGGFPSHPLKAQFTT |
| 504 | MLPAPKNLVVSRVTEDSARLSWTAPDAAFDSFYIAYAEPRPDGEAILLFVPGS |
| | ERSYDLTGLKPGTEYSVLIHGVKGGLLSSPLVAHFTT |
| 505 | MLPAPKNLVVSRVTEDSARLSWTAPDAAFDSFYIAYAEPRPDGEAIGLYVPGS |
| | ERSYDLTGLKPGTEYSVLIHGVKGGLLSSPLGAFFTT |
| 506 | MLPAPKNLVVSRVTEDSARLSWTAPDAAFDSFYIAYAEPRPDGEAILLQVPGS |
| | ERSYDLTGLKPGTEYSVLIHGVKGGLLSSPLTAIFTT |
| 507 | MLPAPKNLVVSRVTEDSARLSWTAPDAAFDSFYIAYAEPRPDGEAITLHVPGS |
| | ERSYDLTGLKPGTEYSVLIHGVKGGLLSSPLSAIFTT |
| 508 | MLPAPKNLVVSRVTEDSARLSWTAPDAAFDSFYIAYAEPRPDGEAIVLEVPGS |
| | ERSYDLTGLKPGTEYSVLIHGVKGGLLSSPLDAHFTT |
| 509 | MLPAPKNLVVSRVTEDSARLSWTAPDAAFDSFYIAYAEPRPDGEAIALHVPGS |
| | ERSYDLTGLKPGTEYSVLIHGVKGGLLSSPLRAVETT |
| 510 | MLPAPKNLVVSRVTEDSARLSWTAPDAAFDSFYIAYAEPRPDGEAIQLWVPGS |
| | ERSYDLTGLKPGTEYSVLIHGVKGGLLSSPLSAIFTT |
| 511 | MLPAPKNLVVSRVTEDSARLSRTAPDAAFDSFYIAYAEPRPDGEAIVLTVPGS |
| | ERSYDLTGLKPGTEYSVLIHGVKGGLLSSPLSAIFTT |
| 512 | MLPAPKNLVVSRVTEDSARLSWTAPDAAFDSFFIGYLEPQPPGEAIQLWVPGS |
| | ERSYDLTGLKPGTEYNVTIQGVKGGFPSRPLQAHFTT |
| 513 | MLPAPKNLVVSRVTEDSARLSWTAPDAAFDSFYIAYAEPRPDGEAITLDVPGS |
| | ERSYDLTGLKPGTEYSVLIHGVKGGLLSSPLYAFFTT |
| 514 | MLPAPKNLVVSRVTEDSARLSWTAPDAAFDSFYIAYAEPRPDGEAIALHVPGS |
| | ERSYDLTGLKPGTEYSVLIHGVKGGLLSSPLSAIFTT |
| 515 | MLPAPKNLVVSRVTEDSARLSWTAPDAAFDSFYIAYAEPRPDGEAIGLWVPGS |
| | ERSYDLTGLKPGTEYSVLIHGVKGGLLSSPLIAHFTT |
| 516 | MLPAPKNLVVSRVTEDSARLSWTAPDAAFDSFYIAYAEPRPDGEAIWLVVPGS |
| | ERSYDLTGLKPGTEYSVLIHGVKGGLLSSPLHARFTT |
| 517 | MLPAPKNLVVSRVTEDSARLSWTAPDAAFDSFYIAYAEPRPDGEAIFLQVPGS |
| | ERSYDLTGLKPGTEYSVLIHGVKGGLLSSPLAAVFTT |
| 518 | MLPAPKNLVVSRVTEDSARLSWTAPDAAFDSFYIAYAEPRPDGEAILLHVPGS |
| | ERSYDLTGLKPGTEYSVLIHGVKGGLLSSPLSAISTT |
| 519 | MLPAPKNLVVSRVTEDSARLSWTAPDAAFDSFYIAYAEPRPDGEAIILQVPGS |
| | ERSYDLTGLKPGTEYSVLIHGVKGGLLSSPLSAVETT |
| 520 | MLPAPKNLVVSRVTEDSARLSWTAPDAAFDSFYIAYAEPRPDGEAIYLKVPGS |
| | ERSYDLTGLKPGTEYSVLIHGVKGGLLSSPLVAHFTT |
| 521 | MLPAPKNLVVSRVTEDSARLSWTAPDAAFDSFYIAYAEPRPDGEAIVLTVPGS |
| | ERSYDLTGLKPGTEYSVLIHGVKGGLLSSPLLAYFTT |
| 522 | MLPAPKNLVVSRVTEDSARLSWTAPDAAFDSFYIAYAEPRPDGEAIILHVPGS |
| | ERSYDLTGLKPGTEYSVLIHGVKGGLLSSPLEAKFTT |
| 523 | MLPAPKNLVVSRVTEDSARLSWTAPDAAFDSFYIAYAEPRPDGEAIKLEVPGS |
| | ERSYDLTGLKPGTEYSVLIHGVKGGLLSSPLAIFTT |
| 524 | MLPAPKNLVVSRVTEDSARLSWTAPDAAFDSFFIGYLEPQPPGEAIYLEVPGS |
| | ERSYDLTGLKPGTEYNVTIQGVKGGFPSFPLKAAFTT |
| 525 | MLPAPKNLVVSRVTEDSARLSWTAPDAAFDSFYIAYAEPRPDGEAIILRVPGS |
| | ERSYDLTGLKPGTEYSVLIHGVKGGLLSSPLVAIFTT |
| 526 | MLPAPKNLVVSRVTEDSARLSWTAPDAAFDSFYIAYAEPRPDGEAIVLQVPGS |
| | ERSYDLTGLKPGTEYSVLIHGVKGGLLSSPLAAWFTT |
| 527 | MLPAPKNLVVSRVTEDSARLSWTAPDAAFDSFYIAYAEPRPDGEAIFLQVPGS |
| | ERSYDLTGLKPGTEYSVLIHGVKGGLLSSPLNAFFTT |
| 528 | MLPAPKNLVVSRVTEDSARLSWTAPDAAFDSFFIGYLEPQPPGEAIILGVPGS |
| | ERSYDLTGLKPGTEYSVLIHGVKGGLLSSPLHAYSTT |
| 529 | MLPAPKNLVVSRVTEDSARLSWTAPDAAFDSFYIAYAEPRPDGEAILLDVPGS |
| | ERSYDLTGLKPGTEYSVLIHGVKGGLLSSPLSAIFTT |
| 530 | MLPAPKNLVVSRVTEDSARLSWTAPDAAFDSFYIAYAEPRPDGEAILLLVPGS |
| | ERSYDLTGLKPGTEYSVLIHGVKGGLLSSPLSAVFTT |
| 531 | MLPAPKNLVVSRVTEDSARLSWTAPDAAFDSFYIAYAEPRPDGEAIHLLVPGS |
| | ERSYDLTGLKPGTEYSVLIHGVKGGLLSSPLLAHFTT |
| 532 | MLPAPKNLVVSRVTEDSARLSWTAPDAAFDSFYIAYAEPRPDGEAIQLWVPGS |
| | ERSYDLTGLKPGTEYSVLIHGVKGGLLSSPLDAYFTT |
| 533 | MLPAPKNLVVSRVTEDSARLSWTAPDAAFDSFFIGYLEPQPPGEAIVLTVPGS |
| | ERSYDLTGLKPGTEYNVTIQGVKGGFPSMPLASFTT |
| 534 | MLPAPKNLVVSRVTEDSARLSWTAPDAAFDSFHIVYHEPRPSGEAIHLQVPGS |
| | ERSYDLTGLKPGTEYNVTIQGVKGGFPSYPLSAFFTT |
| 535 | MLPAPKNLVVSRVTEDSARLSWTAPDAAFDSFFIGYLEPQPPGEAIQLWVPGS |
| | ERSYDLTGLKPGTEYNVTIQGVKGGFPSMPLSAIFTT |
| 536 | MLPAPKNLVVSRVTEDSARLSWTAPDAAFDSFRISYCETFYHGEAIVLTVPGS |
| | ERSYDLTGLKPGTEYSVLIHGVKGGLLSSPLIAKFTT |
| 537 | MLPAPKNLVVSRVTEDSARLSWTAPDAAFDSFYIAYAEPRPDGEAIWLKVPGS |
| | ERSYDLTGLKPGTEYSVLIHGVKGGLLSSPLQANFTT |
| 538 | MLPAPKNLVVSRVTEDSARLSWTAPDAAFDSFYIAYAEPRPDGEAIWLKVPGS |
| | ERSYDLTGLKPGTEYSVLIHGVKGGLLSSPLQANFTT |
| 539 | MLPAPKNLVVSRVTEDSARLSWTAPDAAFDSFYIAYAEPRPDGEAIQLQVPGS |
| | ERSYDLTGLKPGTEYSVLIHGVKGGLLSSPLSAIVTT |
| 540 | MLPAPKNLVVSRVTEDSARLSWTAPDAAFDSFPIAYAEPRPDGEAIVLTVPGS |
| | ERSYDLTGLKPGTEYSVLIHGVKGGLLSSPLSAFFTT |
| 541 | MLPAPKNLVVSRVTEDSARLSWTAPDAAFDSFYIAYAEPRPDGEAIALLVPGS |
| | ERSYDLTGLKPGTEYSVLIHGVKGGLLSSPLVAQFTT |
| 542 | MLPAPKNLVVSRVTEDSARLSWTAPDAAFDSFYIAYAEPRPDGEAIILHVPGS |
| | ERSYDLTGLKPGTEYSVLIHGVKGGLLSSPLEAKFTT |
| 543 | MLPAPKNLVVSRVTEDSARLSWTAPDAAFDSFYIAYAEPRPDGEAIDLHVPGS |
| | ERSYDLTGLKPGTEYSVLIHGVKGGLLSSPLHALFTT |
| 544 | MLPAPKNLVVSRVTEDSARLSWTAPDAAFDSFYIAYAEPRPDGEAILLDVPGS |
| | ERSYDLTGLKPGTEYSVLIHGVKGGFPSMPLSAIFTT |
| 545 | MLPAPKNLVVSRVTEDSARLSWTAPDAAFDSFFIGYLEPQPPGEAIDLAVPGS |
| | ERSYDLTGLKPGTEYSVLIHGVKGGLLSSPLSFTT |
| 546 | MLPAPKNLVVSRVTEDSARLSWTAPDAAFDSFYIAYAEPRPDGEAIYLGVPGS |
| | ERSYDLTGLKPGTEYSVLIHGVKGGLLSSPLRAKFTT |
| 547 | MLPAPKNLVVSRVTEDSARLSWTAPDAAFDSFYIAYAEPRPDGEAIQLGVPGS |
| | ERSYDLTGLKPGTEYSVLIHGVKGGLLSSPLSAIFTT |
| 548 | MLPAPKNLVVSRVTEDSARLSWTAPDAAFDSFFIGYLEPQPPGEAISLLVPDS |
| | ERSYDLTGLKPGTEYNVTIQGVKGGFPSMPLKFTT |
| 549 | MLPAPKNLVVSRVTEDSARLSWTAPDAAFDSFYIAYAEPRPDGEAIGLGVPGS |
| | ERSYDLTGLKPGTEYSVLIHGVKGGLLSSPLDASFTT |
| 550 | MLPAPKNLVVSRVTEDSARLSWTAPDAAFDSFYIAYAEPRPDGEAIQLTVPGS |
| | ERSYDLTGPKPGTEYWVLIQGVKGGGSSVPLVAYFTT |
| 551 | MLPAPKNLVVSRVTEDSARLSWTAPDAAFDSFYIAYAEPRPDGEAISLDVPGS |
| | ERSYDLTGLKPGTEYSVLIHGVKGGLLSSPLEASFTT |
| 552 | MLPAPKNLVVSRVTEDSARLSWTAPDAAFDSFFIGYLEPQPPGEAIILAVPGS |
| | ERSYDLTGLKPGTEYNVTIQGVKGGFPSLPLVASFTT |
| 553 | MLPAPKNLVVSRVTEDSARLSWTAPDAAFDSFDIGYTEYGGYGEAIYLSVPGS |
| | ERSYDLTGLKPGTEYWVLIQGVKGGGSSVPLSAIFTT |
| 554 | MLPAPKNLVVSRVTEDSARLSWTAPDAAFDSFYIAYAEPRPDGEAISLSVPGS |
| | ERSYDLTGLKPGTEYSVLIHGVKGGLLSSPLIANFTT |
| 555 | MLPAPKNLVVSRVTEDSARLSWTAPDAAFDSFYIAYAEPRPDGEAIALLVPGS |
| | ERSYDLTGLKPGTEYSVLIHGVKGGLLSSPLSAIVTT |
| 556 | MLPAPKNLVVSRVTEDSARLSWTAPDAAFDSFYIAYAEPRPDGEAIILDVPGS |
| | ERSYDLTGLKPGTEYSVLIHGVKGGLLSSPLSSIFTT |
| 557 | MLPAPKNLVVSRVTEDSARLSWTAPDAAFDSFYIAYAEPRPDGEAIVLWVPGS |
| | ERSYDLTGLKPGTEYSVLIHGVKGGLLSSPLRASFTT |
| 558 | MLPAPKNLVVSRVTEDSARLSWTAPDAAFDSFYIAYAEPRPDGEAIKLDVPGS |
| | ERSYDLTGLKPGTEYSVLIHGVKGGLLSSPLVAFFTT |
| 559 | MLPAPKNLVVSRVTEDSARLSWTAPDAAFDSFYIAYAEPRPDGEAIILEVPGS |
| | ERSYDLTGLKPGTEYSVLIHGVKGGLLSSPLVAYFTT |
| 560 | MLPAPKNLVVSRVTEDSARLSWTAPDAAFDSFYIAYAEPRPDGEAIHLWVPGS |
| | ERSYDLTGLKPGTEYSVLIHGVKGGLLSSPLHADFTT |
| 561 | MLPAPKNLVVSRVTEDSARLSWTAPDAAFDSFYIAYAEPRPDGEAIWLEVPGS |
| | ERSYDLTGLKPGTEYSVLIHGVKGGLLSSPLVADFTT |
| 562 | MLPAPKNLVVSRVTEDSARLSWTAPDAAFDSFYIAYAEPRPDGEAISLWVPGS |
| | ERSYDLTGLKPGTEYSVLIHGVKGGLLSSPLLAHFTT |
| 563 | MLPAPKNLVVSRVTEDSARLSWTAPDAAFDSFDIGYTEYGGYGEAILHVPGSE |
| | RSYDLTGLKPGTEYWVLIQGVKGGGSSVPLSAIFTT |
| 564 | MLPAPKNLVVSRVTEDSARLSWTAPDAAFDSFFIGYLEPQPPGEAIVLLVPGS |
| | ERSYDLTGLKPGTEYNVTIQGVKGGFPSVPLAAFFTT |
| 565 | MLPAPKNLVVSRVTEDSARLSWTAPDAAFDSFFIGYLEPQPPGEAILLWVPGS |
| | ERSYDLTGLKPGTEYNVTIQGVKGGFPSQFTT |
| 566 | MLPAPKNLVVSRVTEDSARLSWTAPDAAFDSFFIGYLEPQPPGEAILLGVPGS |
| | ERSYDLTGLKPGTEYNVTIQGVKGGFPSMPLHPLVALFTT |
| 567 | MLPAPKNLVVSRVTEDSARLSWTAPDAAFDSFYIAYAEPRPDGEAIGLDVPGS |
| | ERSYDLTGLKPGTEYSVLIHGVKGGLLSSPLSAIFTT |
| 568 | MLPAPKNLVVSRVTEDSARLSWTAPDAAFDSFYIAYAEPRPDGEAIHLSVPGS |
| | ERSYDLTGLKPGTEYSVLIHGVKGGLLSSPLAAYFTT |
| 569 | MLPAPKNLVVSRVTEDSARLSWTAPDAAFDSFFIGYLEPQPPGEAIVLAVPGS |
| | ERSYDLTGLKPGTEYNVTIQGVKGGFPSYPLVAAFTT |
| 570 | MLPAPKNLVVSRVTEDSARLSWTAPDAAFDSFYIAYAEPRPDGEAILLQVPGS |
| | CRSYDLTGLKPGTEYSVLIHGVKGGLLSSPLTAIFTT |
| 571 | MLPAPKNLVVSRVTEDSARLSWTAPDAAFDSFFIGYLEPQPPGEAINLQVPGS |
| | ERSYDLTGLKPGTEYNVTIQGVKGGFPSFPLSAVFTT |
| 572 | MLPAPKNLVVSRVTEDSARLSWTAPDAAFDSFYIAYAEPRPDGEAIQLHVPGS |
| | ERSYDLTGLKPGTEYSVLIHGVKGGLLSSPLVAIFTT |
| 573 | MLPAPKNLVVSRVTEDSARLSWTAPDAAFDSFYIAYAEPRPDGEAIWLAVPGS |
| | ERSYDLTGLKPGTEYSVLIHGVKGGLLSSPLHAQFTT |
| 574 | MLPAPKNLVVSRVTEDSARLSWTAPDAAFDSFYIAYAEPRPDGEAILLGVPGS |
| | ERSYDLTGLKPGTEYSVLIHGVKGGLLSSPLFTT |
| 575 | MLPAPKNLVVSRVTEDSARLSWTAPDAAFDSFYIAYAEPRPDGEAIGLQVPGS |
| | ERSYDLTGLKPGTEYSVLIHGVKGGLLSSPLCAEFTT |
| 576 | MLPAPKNLVVSRVTEDSARLSWTAPDAAFDSFYIAYAEPRPDGEAIVLWVPGS |
| | ERSYDLTGLKPGTEYSVLIHGVKGGLLSSPLIAEFTT |
| 577 | MLPAPKNLVVSRVTEDSARLSWTAPDAAFDSFYIAYAEPRPDGEAISLSVPGS |
| | ERSYDLTGLKPGTEYSVLIHGVKGGLLSSPPKFTT |
| 578 | MLPAPKNLVVSRVTEDSARLSWTAPDAAFDSFYIAYAEPRPDGEAIILEVPGS |
| | ERSYDLTGLKPGTEYSVLIHGVKGGLLSSPLRAVFTT |
| 579 | MLPAPKNLVVSRVTEDSARLSWTAPDAAFDSFYIAYAEPRPDGEAIHLVVPGS |
| | ERSYDLTGLKPGTEYSVLIHGVKGGLLSSPLSAIFTT |
| 580 | MLPAPKNLVVSRVTEDSARLSWTAPDAAFDSFYIAYAEPRPDGEAISLKVPGS |
| | ERSYDLTGLKPGTEYSVLIHGVKGGLLSSPLEAIFTT |
| 581 | MLPAPKNPVVSRVTEDSARLSWTAPDAAFDSFYIAYAEPRPDGEAIHLLVPGS |
| | ERSYDLTGLKPGTEYSVLIHGVKGGLLSSPLKRLSPPVVTITITMAVCRKPVA |
| | ENLSQTLS |
| 582 | MLPAPKNLVVSRVTEDSARLSWTAPDAAFDSFFIGYLEPQPPGEAIFLDVPGS |
| | ERSYDLTGLKPGTEYNVTIQGVKGGFPSPLTAFFTT |
| 583 | MLPAPKNLVVSRVTEDSARLSWTAPDAAFDSFFIGYLEPQPPGEAIVLDVPGS |
| | ERSYDLTGLKPGTEYNVTIQGVKGGFPSHPLAAAFTT |
| 584 | MLPAPKNLVVSRVTEDSARLSWTAPDAAFDSFFIGYLEPQPPGEAIGLAVPGS |
| | ERSYDLTGLKPGTEYNVTIQGVKGGFPSVPLQANFTT |
| 585 | MLPAPKNLVVSRVTEDSARLSWTAPDAAFDSFYIAYAEPRPDGEAILLRVPGS |
| | ERSYDLTGLKPGTEYSVLIHGVKGGLLSSPLVAEFTT |
| 586 | MLPAPKNLVVSRVTEDSARLSWTAPDAAFDSFYIAYAEPRPDGEAILLQVPGS |
| | ERSYDLTGLKPGTEYSVLIHGVKGGLLSSPLSASFTT |
| 587 | MLPAPKNLVVSRVTEDSARLSWTAPDAAFDSFYIAYAEPRPDGEAIGLHVPGS |
| | ERSYDLTGLKPGTEYSVLIHGVKGGLLSSPLTASFTT |
| 588 | MLPAPKNLVVSRVTEDSARLSWTAPDAAFDSFYIAYAEPRPDGEAIGLRVPGS |
| | ERSYDLTGLKPGTEYSVLIHGVKGGLLSSPLSAIFTT |
| 589 | MLPAPKNLVVSRVTEDSARLSWTAPDAAFDSFYIAYAEPRPDGEAIVLRVPGS |
| | ERSYDLTGLKPGTEYSVLIHGVKGGLLSSPLAASFTT |
| 590 | MLPAPKNLVVSRVTEDSARLSWTAPDAAFDSFYIAYAEPRPDGEAIQLLVPGS |
| | ERSYDLTGLKPGTEYSVLIHGVKGGLLSSPLVAHFTT |
| 591 | MLPAPKNLVVSRVTEDSARLSWTAPDAAFDSFYIAYAEPRPDGEAIWLLVPGS |
| | ERSYDLTGLKPGTEYSVLIHGVKGGLLSSPLVAFFTT |
| 592 | MLPAPKNLVVSRVTEDSARLSWTAPDAAFDSFFIGYLEPQPPGEAIHLYVPGS |
| | ERSYDLTGLKPGTEYNVTIQGVKGGFPSDPLDAVFTT |
| 593 | MLPAPKNLVVSRVTEDSARLSWTAPDAAFDSFFIGYLEPQPPGEAIYLDVPGS |
| | ERSYDLTGLKPGTEYNVTIQGVKGGFPSTFTT |
| 594 | MLPAPKNLVVSRVTEDSARLSWTAPDAAFDSFYIAYAEPRPDGEAIQLFVPGS |
| | ERSYDLTGLKPGTEYSVLIHGVKGGLLSSPLKAYFTT |
| 595 | MLPAPKNLVVSRVTEDSARLSWTAPDAAFDSFYIAYAEPRPDGEAIVLVVPGS |
| | ERSYDLTGLKPGTEYSVLIHGVKGGLLSSPLSAIFTT |
| 596 | MLPAPKNLVVSRVTEDSARLSWTAPDAAFDSFFIGYLEPQPPGEAIQLTVPGS |
| | ERSYDLTGLKPGTEYNVTIQGVKGGFPSLPLSADFTT |
| 597 | MLPAPKNLVVSRVTEDSARLSWTAPDAAFDSFYIAYAEPRPDGEAILLQVPGS |
| | ERSYDLTGLKPGTEYSVLIHGVKGGLLSSPLDAEFTT |
| 598 | MLPAPKNLVVSRVTEDSARLSWTAPDAAFDSFYIAYAEPRPDGEAIVLAVPGS |
| | ERSYDLTGLKPGTEYSVLIHGVKGGLLSSPLYASFTT |
| 599 | MLPAPKNLVVSRVTEDSARLSWTTPDAAFDSFYIAYAEPRPDGEAIRLQVPGS |
| | ERSYDLTGLKPGTEYSVLIHGVKGGLLSSPLGFTT |
| 600 | MLPAPKNLVVSRVTEDSARLSWTAPDAAFDSFYIAYAEPRPDGEAIQLVVPGS |
| | ERSYDLTGLKPGTEYSVLIHGVKGGLLSSPLYAIFTT |
| 601 | MLPAPKNLVVSRVTEDSARLSWTAPDAAFDSFYIAYAEPRPDGEAISLSVPGS |
| | ERSYDLTGLKPGTEYSVLIHGVKGGLLSSPLHAKFTT |
| 602 | MLPAPKNLVVSRVTEDSARLSWTAPDAAFDSFFIGYLEPQPPGEAIHLGVPGS |
| | ERSYDLTGLKPGTEYNVTIQGVKGGFPSIPLFASFTT |
| 603 | MLPAPKNLVVSRVTEDSARLSWTAPDAAFDSFYIAYAEPRPDGEAIQLLVPGS |
| | ERSYDLTGLKPGTEYSVLIHGVKGGLLSSPLYAAFTT |
| 604 | MLPAPKNLVVSRVTEDSARLSWTAPDAAFDSFFIGYLEPQPPGEAIHLAVPGS |
| | ERSYDLTGLKPGTEYNVTIQGVKGGFPSVPLAAVETT |
| 605 | MLPAPKNLVVSRVTEDSARLSWTAPDAAFDSFYIAYAEPRPDGEAISLQVPGS |
| | ERSYDLTGLKPGTEYSVLIHGVKGGLLSSPLGAHFTT |
| 606 | MLPAPKNLVVSRVTEDSARLSWTAPDAAFDSFYIAYAEPRPDGEAIALWVPGS |
| | ERSYDLTGLKPGTEYSVLIHGVKGGLLSSPLVASFTT |
| 607 | MLPAPKNLVVSRVTEDSARLSWTAPDAAFDSFYIAYAEPRPDGEAIQLHVPGS |
| | ERSYDLTGLKPGTEYSVLIHGVKGGLLSSPLYAFFTT |
| 608 | MLPAPKNLVVSRVTEDSARLSWTAPDAAFDSFYIAYAEPRPDGEAILLHVPGS |
| | ERSYDLTGLKPGTEYSVLIHGVKGGLLSSPLRASFTT |
| 609 | MLPAPKNLVVSRVTEDSARLSWTAPDAAFDSFYIAYAEPRPDGEAIWLGVPGS |
| | ERSYDLTGLKPGTEYSVLIHGVKGGLLSSPLHATFTT |
| 610 | MLPAPKNLVVSRVTEDSARLSWTAPDAAFDSFYIAYAEPRPDGEAIVLEVPGS |
| | ERSYDLTGLKPGTEYSVLIHGVKGGLLSSPLHANFTT |
| 611 | MLPAPKNLVVSRVTEDSARLSWTAPDAAFDSFYIAYAEPRPDGEAILLRVPGS |
| | ERSYDLTGLKPGTEYSVLIHGVKGGLLSSPLYAKFTT |
| 612 | MLPAPKNLVVSRVTEDSARLSWTAPDAAFDSFFIGYLEPQPPGEAIGLWVPGS |
| | ERSYDLTGLKPGTEYNVTIQGVKGGFPSDPLQAVETT |
| 613 | MLPAPKNLVVSRVTEDSARLSWTAPDAAFDSFYIAYAEPRPDGEAIVLHVPGS |
| | ERSYDLTGLKPGTEYSVLIHGVKGGLLSSPLDAFFTT |
| 614 | MLPAPKNLVVSRVTEDSARLSWTAPDAAFDSFYIAYAEPRPDGEAIILHVPGS |
| | ERSYDLTGLKPGTEYSVLIHGVKGGLLSSPLDAYFTT |
| 615 | MLPAPKNLVVSRVTEDSARLSWTAPDAAFDSFYIAYAEPRPDGEAILLAVPGS |
| | ERSYDLTGLKPGTEYSVLIHGVKGGLLSSPLSAKFTT |
| 616 | MLPAPKNLVVSRVTEDSARLSWTAPDAAFDSFFIGYLEPQPPGEAILLFVPGS |
| | ERSYDLTGLKPGTEYNVTIQGVKGGFPSTPLSASFTT |
| 617 | MLPAPKNLVVSRVTEDSARLSWTAPDAAFDSFYIAYAEPRPDGEAIQLTVPGS |
| | ERSYDLTGLKPGTEYSVLIHGVKGGLLSSPLHAYFTT |
| 618 | MLPAPKNLVVSRVTEDSARLSWTAPDAAFDSFYIAYAEPRPDGEAIQLGVPGS |
| | ERSYDLTGLKPGTEYSVLIHGVKGGLLSSPLRAYFTT |
| 619 | MLPAPKNLVVSRVTEDSARLSWTAPDAAFDSFYIAYAEPRPDGEAILLEVPGS |
| | ERSYDLTGLKPGTEYSVLIHGVKGGLLSSPLVAFFTT |
| 620 | MLPAPKNLVVSRVTEDSARLSWTAPDAAFDSFYIAYAEPRPDGEAIQLGVPGS |
| | ERSYDLTGLKPGTEYSVLIHGVKGGLLSSPLLAVFTT |
| 621 | MLPAPKNLVVSRVTEDSARLSWTAPDAAFDSFYIAYAEPRPDGEAIHLRVPGS |
| | ERSYDLTGLKPGTEYNVTIQGVKGGFPSMPLSAIFTT |
| 622 | MLPAPKNLVVSRVTEDSARLSWTAPDAAFDSFYIAYAEPRPDGEAILLQVPGS |
| | ERSYDLTGLKPGTEYSVLIHGVKGGLLSSPLIAKFTT |
| 623 | MLPAPKNLVVSRVTEDSARLSWTAPDAAFDSFYIAYAEPRPDGEAIVLHVPGS |
| | ERSYDLTGLKPGTEYSVLIHGVKGGLLSSPLQAIFTT |
| 624 | MLPAPKNLVVSRVTEDSARLSWTAPDAAFDSFYIAYAEPRPDGEAIALVVPGS |
| | ERSYDLTGLKPGTEYSVLIHGVKGGLLSSPLAANFTT |
| 625 | MLPAPKNLVVSRVTEDSARLSWTAPDAAFDSFYIAYAEPRPDGEAINLSVPGS |
| | ERSYDLTGLKPGTEYSVLIHGVKGGLLSSPLDAYFTT |
| 626 | MLPAPKNLVVSRVTEDSARLSWTAPDAAFDSFYIAYAEPRPDGEAIVLEVPGS |
| | ERSYDLTGLKPGTEYSVLIHGVKGGLLSSPLTASFTT |
| 627 | MLPAPKNLVVSRVTEDSARLSWTAPDAAFDSFYIAYAEPRPDGEAIRLQVPGS |
| | ERSYDLTGLKPGTEYSVLIHGVKGGLLSSPLGASFTT |
| 628 | MLPAPKNLVVSRVTEDSARLSWTAPDAAFDSFYIAYAEPRPDGEAIGLWVPGS |
| | ERSYDLTGLKPGTEYSVLIHGVKGGLLSSPLVAYFTT |
| 629 | MLPAPKNLVVSRVTEDSARLSWTAPDAAFDSFYIAYAEPRPDGEAIYLEVPGS |
| | ERSYDLTGLKPGTEYSVLIHGVKGGLLSSPLFTT |
| 630 | MLPAPKNLVVSRVTEDSARLSWTAPDAAFDSFYIAYAEPRPDGEAIWLDVPGS |
| | ERSYDLTGLKPGTEYSVLIHGVKGGLLSSPLDAYFTT |
| 631 | MLPAPKNLVVSRVTEDSARLSWTAPDAAFDSFAIEYCETKMCGEAIVLTVPGS |
| | ERSYDLTGLKPGTEYRVPIPGVKGGTASLPLSAIFTT |
| 632 | MLPAPKNLVVSRVTEDSARLSWTAPDAAFDSFFIYYIESYPAGEAIVLTVPGS |
| | ERSYDLTGLKPGTEYWVGIDGVKGGRWSTPLSAIFTT |
| 633 | MLPAPKNLVVSRVTEDSARLSWTAPDAAFDSFFIYYIESYPAGEAIVLTVPGS |
| | CRSYDLTGLKPGTEYWVGIDGVKGGRWSTPLSAIFTT |
| 634 | MLPAPKNLVVSRVTEDSARLSWTAPDAAFDSFAIVYHEPRPDGEAIVLTVPGS |
| | CRSYDLTGLKPGTEYEVVILGVKGGVHSYPLSAIFTTAPAPAPAPAPLPAPKN |
| | LVVSRVTEDSARLSWTAPDAAFDSFAIVYHEPRPDGEAIVLTVPGSERSYDLT |
| | GLKPGTEYEVVILGVKGGVHSYPLSAIFTT |
| 635 | MLPAPKNLVVSRVTEDSARLSWTAPDAAFDSFAIVYHEPRPDGEAIVLTVPGS |
| | CRSYDLTGLKPGTEYEVVILGVKGGVHSYPLSAIFTTGGGGSGGGGSGGGGSG |
| | GGGSLPAPKNLVVSRVTEDSARLSWTAPDAAFDSFAIVYHEPRPDGEAIVLIV |
| | PGSERSYDLTGLKPGTEYEVVILGVKGGVHSYPLSAIFTT |
| 636 | MLPAPKNLVVSRVTEDSARLSWTAPDAAFDSFAIVYHEPRPDGEAIVLTVPGS |
| | CRSYDLTGLKPGTEYEVVILGVKGGVHSYPLSAIFTTEAAAKEAAAKEAAAKE |
| | AAAKLPAPKNLVVSRVTEDSARLSWTAPDAAFDSFAIVYHEPRPDGEAIVLTV |
| | PGSERSYDLTGLKPGTEYEVVILGVKGGVHSYPLSAIFTT |
| 637 | MLPAPKNLVVSRVTEDSARLSWTAPDAAFDSFAIVYHEPRPDGEAIVLTVPGS |
| | CRSYDLTGLKPGTEYEVVILGVKGGVHSYPLSAIFTTEAAAKLPAPKNLVVSR |
| | VTEDSARLSWTAPDAAFDSFAIVYHEPRPDGEAIVLTVPGSERSYDLIGLKPG |
| | TEYEVVILGVKGGVHSYPLSAIFTT |
| 638 | MLPAPKNLVVSRVTEDSARLSWTAPDAAFDSFKIEYFEYVGYGEAIVLTVPGS |
| | CRSYDLTGLKPGTEYYVAIYGVKGGWYSRPLSAIFTTAPAPAPAPAPLPAPKN |
| | LVVSRVTEDSARLSWTAPDAAFDSFKIEYFEYVGYGEAIVLTVPGSERSYDLT |
| | GLKPGTEYYVAIYGVKGGWYSRPLSAIFTT |
| 639 | MLPAPKNLVVSRVTEDSARLSWTAPDAAFDSFKIEYFEYVGYGEAIVLTVPGS |
| | CRSYDLTGLKPGTEYYVAIYGVKGGWYSRPLSAIFTTGGGGSGGGGSGGGGSG |
| | GGGSLPAPKNLVVSRVTEDSARLSWTAPDAAFDSFKIEYFEYVGYGEAIVLIV |
| | PGSERSYDLTGLKPGTEYYVAIYGVKGGWYSRPLSAIFTT |
| 640 | MLPAPKNLVVSRVTEDSARLSWTAPDAAFDSFKIEYFEYVGYGEAIVLTVPGS |
| | CRSYDLTGLKPGTEYYVAIYGVKGGWYSRPLSAIFTTEAAAKEAAAKEAAAKE |
| | AAAKLPAPKNLVVSRVTEDSARLSWTAPDAAFDSFKIEYFEYVGYGEAIVLTV |
| | PGSERSYDLTGLKPGTEYYVAIYGVKGGWYSRPLSAIFTT |
| 641 | MLPAPKNLVVSRVTEDSARLSWTAPDAAFDSFKIEYFEYVGYGEAIVLTVPGS |
| | CRSYDLTGLKPGTEYYVAIYGVKGGWYSRPLSAIFTTEAAAKLPAPKNLVVSR |
| | VTEDSARLSWTAPDAAFDSFKIEYFEYVGYGEAIVLTVPGSERSYDLIGLKPG |
| | TEYYVAIYGVKGGWYSRPLSAIFTT |
| 642 | MLPAPKNLVVSRVTEDSARLSWTAPDAAFDSFAIVYHEPRPDGEAIVLTVPGS |
| | CRSYDLTGLKPGTEYEVVILGVKGGVHSYPLSAIFTT |
| 643 | MLPAPKNLVVSRVTEDSARLSWTAPDAAFDSFAIVYHEPRPDGEAIVLTVPGS |
| | ERSYDLTGLKPGTEYEVVILGVKGGVHSYPLSAIFTT |
| 644 | MLPAPKNLVVSRVTEDSARLSWTAPDAAFDSFFIGYLEPQPPGEAIHLGVPGS |
| | CRSYDLTGLKPGTEYNVTIQGVKGGFPSIPLFASFTT |
| 663 | MLPAPKNLVVSRVTEDSARLSWTAPDAAFDSFFIGYLEPQPPGEAIVLTVPGS |
| | ERSYDLTGLKPGTEYNVTIQGVKGGFPSMPLSAIFTT |
| 664 | MLPAPKNLVVSRVTEDSARLSWTAPDAAFDSFIIPYAEVRPDGEAIVLTVPGS |
| | ERSYDLTGLKPGTEYSVLIHGVKGGKLSLPLSAIFTT |
| 665 | MLPAPKNLVVSRVTEDSARLSWTAPDAAFDSFYIAYAEPRPDGEAIVLTVPGS |
| | ERSYDLTGLKPGTEYSVLIHGVKGGLLSSPLSAIFTT |
| 666 | MLPAPKNLVVSRVTEDSARLSWTAPDAAFDSFYIVYAEPIPNGEAIVLTVPGS |
| | ERSYDLTGLKPGTEYSVLIHGVKGGRNSDPLSAIFTT |
| 667 | MLPAPKNLVVSRVTEDSARLSWTAPDAAFDSFDIGYTEYGGYGEAIVLTVPGS |
| | ERSYDLTGLKPGTEYWVLIQGVKGGGSSVPLSAIFTT |
| 668 | MLPAPKNLVVSRVTEDSARLSWTAPDAAFDSFHIVYHEPRPSGEAIVLTVPGS |
| | ERSYDLTGLKPGTEYEVGIVSVKGGDLSVPLSAIFTT |
| 669 | MLPAPKNLVVSRVTEDSARLSWTAPDAAFDSFAIVYHEPRPDGEAIVLTVPGS |
| | ERSYDLTGLKPGTEYEVVILGVKGGVHSYPLSAIFTT |
| 670 | MLPAPKNLVVSRVTEDSARLSWTAPDAAFDSFLIPYAETSPSGEAIVLTVPGS |
| | ERSYDLTGLKPGTEYSVLIHGVKGGDYSSPLSAIFTT |
| 671 | MLPAPKNLVVSRVTEDSARLSWTAPDAAFDSFPIAYAEPRPDGEAIVLTVPGS |
| | ERSYDLTGLKPGTEYSVLIHGVKGGLLSSPLSAISTT |
| 672 | MLPAPKNLVVSRVTEDSARLSWTAPDAAFDSFYIAYAEPRPDGEAILLQVPGS |
| | ERSYDLTGLKPGTEYSVLIHGVKGGLLSSPLTAIFTT |
| 1395 | MLPAPKNLVVSRVTEDSARLSWTAPDAAFDSFYIAYAEPRPDGEAILLLVPGS |
| | ERSYDLTGLKPGTEYSVLIHGVKGGLLSSPLVASFTT |
| 1396 | MLPAPKNLVVSRVTEDSARLSWTAPDAAFDSFGIGYWERRWYGEAIVLTVPGS |
| | ERSYDLTGLKPGTEYEVTIRGVKGGGYSGPLSAIFTT |
| 1397 | MLPAPKNLVVSRVTEDSARLSWTAPDAAFDSFDIGYTEYGGYGEAIILQVPGS |
| | ERSYDLTGLKPGTEYWVLIQGVKGGGSSVPLVAYFTT |
| 1398 | MLPAPKNLVVSRVTEDSARLSWTAPDAAFDSFYIAYAEPRPDGEAIILGVPGS |
| | ERSYDLTGLKPGTEYSVLIHGVKGGLLSSPLSAYSTT |
| 1399 | MLPAPKNLVVSRVTEDSARLSWTAPDAAFDSFFIGYLEPQPPGEAIHLIVPGS |
| | ERSYDLTGQKPGTEYNVTIQGVKGGFPSDPLVASFTT |
| 1400 | MLPAPKNLVVSRVTEDSARLSWTAPDAAFDSFHIVYHEPRPSGEAIWLWVPGS |
| | ERSYDLTGLKPGTEYEVGIVSVKGGDLSVPLSAIFTT |
| 1401 | MLPAPKNLVVSRVTEDSARLSWTAPDAVFDSFYIAYAEPRPDGEAIGLYVPGS |
| | ERSYDLTGLKPGTEYSVLIHGVKGGLLSSPLTASFTT |
| 1402 | MLPAPKNLVVSRVTEDSARLSWTAPDAAFDSFFIGYLEPQPPGEAIGLQVPGS |
| | ERSYDLTGLKPGTEYNVTIQGVKGGFPSMPLSAIFTT |
| 1403 | MLPAPKNLVVSRVTEDSARLSWTAPDAAFDSFYIAYAEPRPDGEAILLQVPGS |
| | ERSYDLTGLKPGTEYSVLIHGVKGGLLSSPLVAKFTT |
| 1404 | MLPAPKNLVVSRVTEDSARLSWTAPDAAFDSFFIGYLEPQPPGEAIILHVPGS |
| | ERSYDLTGLKPGTEYNVTIQGVKGGFPSLPLNANFTT |
| 1405 | MLPAPKNLVVSRVTEDSARLSWTAPDAAFDSFHIVYHEPRPSGEAIYLEVPGS |
| | ERSYDLTGLKPGTEYEVGIVSVKGGDLSVPLRAHFTT |
| 1406 | MLPAPKNLVVSRVTEDSARLSWTAPDAAFDSFFIGYLEPQPPGEAISLWVPGS |
| | ERSYDLTGLKPGTEYNVTIQGVKGGFPSIPLWAIFTT |
| 1407 | MLPAPKNLVVSRVTEDSARLSWTAPDAAFDSFFIGYLEPQPPGEAIDLWVPGS |
| | ERSYDLTGLKPGTEYNVTIQGVKGGFPSMPLSAIFTT |
| 1408 | MLPAPKNLVVSRVTEDSARLSWTAPDAAFDSFFIGYLEPQPPGEAIYLLVPGS |
| | ERSYDLTGLKPGTEYNVTIQGVKGGFPSDPLSAIFTT |
| 1409 | MLPAPKNLVVSRVTEDSARLSWTAPDAAFDSFHIVYHEPRPSGEAIWLFVPGS |
| | ERSYDLTGLKPGTEYEVGIVSVKGGDLSVPLSAIFTT |
| 1410 | MLPAPKNLVVSRVTEDSARLSWTAPDAAFDSFFIGYLEPQPPGEAIDLYVPGS |
| | ERSYDLTGLKPGIEYNVTIQGVKGGFPSLPLQAHFTT |
| 1411 | MLPAPKNLVVSRVTEDSARLSWTAPDAAFDSFYIAYAEPRPDGEAILLLVPGS |
| | ERSYDLTGLKPGTEYSVLIHGVKGGLLSSPLIAGFTT |
| 1412 | MLPAPKNLVVSRVTEDSARLSWTAPDAAFDSFFIGYLEPQPPGEAIWLLVPGS |
| | ERSYDLTGLKPGTEYNVTIQGVKGGFPSTPLSAIFTT |
| 1413 | MLPAPKNLVVSRVTEDSARLSWTAPDAAFDSFYIAYAEPRPDGEAITLWVPGS |
| | ERSYDLTGLKPGTEYSVTIHGVKGGLLSSPLSAIFTT |
| 1414 | MSLPAPKNLVVSRVTEDSARLSWTAPDAAFDSFFIGYLEPQPPGEAIELYVPG |
| | SERSYDLTGLKPGTEYNVTIQGVKGGFPSDPLVAFFTT |
| 1415 | MSLPAPKNLVVSRVTEDSARLSWTAPDAAFDSFEIAYQELSLWGEAIVLTVPG |
| | SERSYDLTGLKPGTEYWVQIGGVKGGEWSAPLSAIFTT |
| 1416 | MSLPAPKNLVVSRVTEDSARLSWTAPDAAFDSFFIGYLEPQPPGEAITLYVPG |
| | SERSYDLTGLKPGTEYNVTIQGVKGGFPSAPLSAIFTT |
| 1417 | MSLPAPKNLVVSRVTEDSARPSWTAPDAAFDSFEIGYFENLYLGEAIVLTVPG |
| | SERSYDLTGLKPGTEYYVHIGGVKGGIWSSPLSAYFTT |
| 1418 | MSLPAPKNLVVSRVTEDSARLSWTAPDAAFDSFAIRYWELRATGEAIPLSVPG |
| | SERSYDLTGLKPGTEYHVAISGVKGGKSSYPLRASFTT |
| 1419 | MSLPAPKNLVVSRVIEDSARLSWTAPDAAFDSFEIGYFENLYLGEAIVLTVPG |
| | SERSYDLTGLKPGTEYWVQIGGVKGGNWSAPLSAIFTT |
| 1420 | MSLPAPKNLVVSRVTEDSARLSWTAPDAAFDSFYIAYAEPRPDGEAIILLVPG |
| | SERSYDLTGLKPGTEYSVLIHGVKGGLLSSPLHAHFTT |
| 1421 | MSLPAPKNLVVSRVTEDSARLSWTAPDAVFDSFEIAYQELSLWGEAIVLTVPG |
| | SERSYDLTGLKPGTEYYVHIGGVKGGIWSSPLSAYFTT |
| 1422 | MSLPAPKNLVVSRVTEDSARLSWTAPDAAFDSFFIGYLEPQPPGEAITLLVPG |
| | SERSYDLTGLKPGTEYNVTIQGVKGGFPSGPLQASFTT |
| 1423 | MSSLPAPKNLVVSRVTEDSARLSWTAPDAAFDSFEIGYFENLYLGEAIVLTVP |
| | GSERSYDLTGLKPGTEYWVQIGGVKGGNWSAPLSAIFTT |
| 1424 | MGGSLPAPKNLVVSRVTEDSARLSWTAPDAAFDSFEIGYFENLYLGEAIVLIV |
| | PGSERSYDLTGLKPGTEYWVQIGGVKGGNWSAPLSAIFTT |
| 1425 | MSLPAPKNLVVSRVTEDSARLSWTAPDAAFDSFEIAYFERTWFGEAIVLTVPG |
| | SERSYDLTGLKPGTEYWVQIGGVKGGDWSAPLSAIFTT |
| 1426 | MSLPAPKNLVVSRVTEDSARLSWTAPDAAFDSFEIAYFENDWAGEAIVLTVPG |
| | SERSYDLTGLKPGTEYVVFIGGVKGGDFSPPLSAIFTT |
| 1427 | MSLPAPKNLVVSRVTEDSARLSWTAPDAAFDSFEIGYFENLYLGEAIVLTVPG |
| | SERSYDLTGLKPGTEYWVQIGGVKGVNWSAPLSAIFTT |
| 1428 | MSLPAPKNLVVSRVTEDSARLSWTAPDAAFDSFKIKYAEYDRYGEAIALFVPG |
| | SERSYDLTGLKPGTEYFVHIDGVKGGTDSQPLVASFTT |
| 1429 | MSLPAPKNLVVSRVTEDSARLSWTAPDAAFDSEDINYWENESGGEAIALFVPG |
| | SERSYDLTGLKPGTEYLVTIAGVKGGWWSKPLYATFTT |
| 1430 | MSLPAPKNLVVSRVTEDSARLSWTAPDAAFDSFFIGYLEPQSPGEAIALYVPG |
| | SERSYDLTGLKPGTEYNVTIQGVKGGFPSEPLIANFTT |
| 1431 | MSLPAPKNLVVSRVTEDSARLSWTAPDAAFDSFEIDYVEFIFTGEAIGLIVPG |
| | SERSYDLTGLKPGTEYWVTIAGVKGGEWSTPLQAFLTT |
| 1432 | MSLPAPKNLVVSRVTEDSARLSWTAPDAAFDSFFIGYLEPQPPGEAITLYVPG |
| | SERSYDLTGLKPGTEYNVTIQGVKGGFPSDPLVAHFTT |
| 1433 | MSLPAPKNLVVSRVTEDSARLSWTAPDAAFDSFFIGYLEPQPPGEVIHLFVPG |
| | SERSYDLTGLKPGTEYNVTIQGVKGGFPSMPLSAIFTT |
| 1434 | MSLPAPKNLVVSRVTEDSARLSWTAPDAAFDSFEIGYFENLYLGEAIVLTVPG |
| | SERSYDLTGLKPGTEYWVQIGGVKGGAYSTPLSAIFTT |
| 1435 | MSLPAPKNLVVSRVTEDSARLSWTAPDAAFDSFFIGYLEPQPPGEAIHLYVPG |
| | SERSYDLTGLKPGTEYNVTIQGVKGGFPSMPLSAIFTT |
| 1436 | MSLPAPKNLVVSRVTEDSARLSWTAPDAAFDSFEIGYFENLYLGEAIVLTVPG |
| | SERSYDLTGLKPGTEYWVQIGGVKGGNWSAPLSAYFTT |
| 1437 | MSLPAPKNLVVSRVTEDSARLSWTASDAAFDSFHIWYFEKANEGEAIPLVVPG |
| | SERSYDLTGLKPGTEYDVDIGGVKGGAWSIPLGARFTT |
| 1438 | MSLPAPKNLVVSRVTEDSARLSWTAPDAAFDSFAIQYVEVIGSGEAIELIVPG |
| | SERSYDLTGLKPGTEYHVYIDGVKGGKDSKPLYAGFTT |
| 1439 | MSLPAPKNLVVSRVTEDSARLSWTAPDAAFDSFEIGYFENLYLGEAIVLTVPG |
| | SERSYDLTSLKPGTEYWVQIGGVKGGNWSAPLSATFTT |
| 1440 | MSLPAPKNLVVSRVTEDSARLSWTAPDAAFDSFFIGYLEPQPPGEAIALLVPG |
| | SERSYDLTGLKPGTEYNVTIQGVKGGFPSHPLSAKFTT |
| 1441 | MSLPAPKNLVVSRVTEDSARLSWTAPDAAFDSFDIGYFENTYEGEAIVLTVPG |
| | SERSYDLTGLKPGTEYVVWIGGVKGGSYSSPLSAIFTT |
| 1442 | MSLPAPKNLVVSRVTEDSARLSWTAPDAAFDSFFIGYLEPQPPGEAIELFVPG |
| | SERSYDLTGLKPGTEYNVTIQGVKGGFPSGPLIASFTT |
| 1443 | MSLPAPKNLVVSRVTEDSARLSWTAPDAAFDSFEIVYQENSAYGEAIVLTVPG |
| | SERSYDLTGLKPGTEYWVQIGGVKGGEWSAPLSAIFTT |
| 1444 | MSLPAPKNLVVSRVTEDSARLSWTAPDAAFDSFDIGYFELRYYGEAIVLTVPG |
| | SERSYDLTGLKPGTEYWVSIGGVKGGTYSAPLSAIFTT |
| 1445 | MSLPAPKNLVVSRVTEDSARLSWTAPDAAFDSFDIGYFENSYAGEAIVLTVPG |
| | SERSYDLIGLKPGTEYYVSIAGVKGGRFSPPLSAIFTT |
| 1446 | MSLPAPKNLVVSRITEDSARLSWTAPDAAFDSFEIAYFETCRTGEAIVLTVPG |
| | SERSYDLTGLKPGTEYRVWIGGVKGGVWSRPLSAIVTT |
| 1447 | MSLPAPKNLVVSRVTEDSARLSWTAPDAAFDSFDIGYFEATYYGEAIVLIVPG |
| | SERSYDLTGLKPGTEYWVQIGGVKGGNWSAPLSAIFTT |
| 1448 | MSLPAPKNLVVSRVTEDSARLSWTAPDAAFDSFYIAYAEPRPDGEAIVLAVPG |
| | SERSYDLTGLKPGTEYSVLIHGVKGGLLSSPLGADFTT |
| 1449 | MSLPAPKNLVVSRVTEDSARLSWTAPDAAFDSFEIGYFENLYLGEAIVLTVPG |
| | SERSYDLTGLKPGTEYWVQIGGVKGGNWSAPLSAIFTT |
| 1450 | MSLPAPENLVVSRVTEDSARLSWTAPDAAFDSFEIGYFENLYLGEAIVLTVPG |
| | SERSYDLTGLKPGTEYWVQIGGVKGGVWSRPLSAIFTT |
| 1451 | MSLPAPKNLVVSRVTEDSARLSWTAPDAAFDSFEIGYFEMSWTGEAIVLTVPG |
| | SERSYDLTGLKPGTEYVVFIGGVKGGNWSAPLSAIFTT |
| 1452 | MSLPAPKNLVVSRVTEDSARLSWTAPDAAFDSFEIGYGEFTYYGEAIVLTVPG |
| | SERSYDLTGLKPGTEYWVQIGGVKGGNWSNPLSAIFTT |
| 1453 | MSLPAPKNLVVSRVTEDSARLSWTAPDAAFDSFEIAYFERTWEGEAIVLTVPG |
| | SERSYDLTGLKPGTEYWVQIGGVKGGDWSKPLSAIFTT |
| 1454 | MSLPAPKNLVVSRVTEDSARLSWTAPDAAFDSFEIVYQENSAYGEAIVLIVPG |
| | SERSYDLTGLKPGTEYWVQIGGVKGGNWSAPLSAISTT |
| 1455 | MSLPAPKNLVVSRVTEDSARLSWTAPDAAFDSFEIGYFENLYLGEAIVLTVPG |
| | SERSYDLTGLKPGTEYWVQIGGVKGGNWSVPLSAIFTT |
| 1456 | MSLPAPKNLVVSRVTEDSARLSWTAPDAAFDSFFIGYLEPQPPGEAIVLTVPG |
| | SERSYDLTGLKPGTEYNVTIQGVKGGFPSEPLVAHFTT |
| 1457 | MSLPAPKNLVVSRVTEDSARLSWTALDAAFDSFEISYWEHTENGEAIILFVPG |
| | SERSYDLTGLKPGTEYYVTIGGVKGGAWSPPLWAEFTT |
| 1458 | MSLPAPKNLVVSRVTEDSARLSWTAPDAAFDSFFIGYLEPQPPGEVIHLYVPG |
| | SERSYDLTGLKPGTEYVVFIGGVKGGVWSVPLSAIFTT |
| 1459 | MSLPAPKNLVVSRVTEDSARLSWTAPDAAFDSFFIGYLEPQPPGEAIHLYVPG |
| | SERSYDLTGLKPGTEYWVQIGGVKGGNWSAPLSAIFTT |
| 1460 | MSLPAPKNLVVSRVTEDSARLSWTAPDAAFDSFYIAYAEPRPDGEAILLEVPG |
| | SERSYDLAGLKPGTEYSVLIHGVKGGLLSSPLGAEFTT |
| 1461 | MSLPAPKNLVVSRVTEDSARLSWTAPDAAFDSFEIGYFENLYLGEAIVLTVPG |
| | SERSYDLTGLKPGTEYWVQIGGIKGGNWSAPLSAIFTT |
| 1462 | MSLPAPKNLVVSRVTEDSARLSWTAPDAAFDSFFIGYLEPQPPGEAIVLTVPG |
| | SERSYDLTGLKPGTEYNVTIQGVKGGFPSVPLSAAFTT |
| 1463 | MSLPAPKNLVVSRVTEDSARLSWTAPDAAFDSFIIGYLEPQPPDEAIALYVPG |
| | SERSYDLTGLKPGTEYNVTIQGVKGGFPSLPLVATFTT |
| 1464 | MSLPAPKNLVVSRVTEDSARLSWTAPDAAFDSFEIGYFENLYLGEAIVLTVPG |
| | SERSYDLTGLKPGTEYWVQIGGVKGGNWSAPLSATFTT |
| 1465 | MSLPAPKNLVVSRVTEDSARLSWTAPDAAFDSFEIGYFENLYLGEAIVLIVPG |
| | SERSYDLTGLKPGTEYWVQIGGVKGGNWSTPLSAIFTT |
| 1466 | MSLPAPKNLVVSRVTEDSARLSWTAPDAAFDSFEIGYFENLYLGEAIVLIVPG |
| | SERSYDLTGLKPGTEYWVQIGGVKGGEWSSPLSAIFTT |
| 1467 | MSRPAPKNLVVSRVTEDSARLSWTAPGAAFDSFEIAYFERTWEGEAIVLTVPS |
| | SERSYDLTGLKPGTEYWVQIGGVKGGDWSKPLSAIFTT |
| 1468 | MSLPAPKNLVVSRVTEDSARLSWTAPDAAFDSFEIAYQELSLWGEAIVLTVPG |
| | SERSYDLTGLKPGTEYYVHIGGVKGGIWSSPLVAHFTT |
| 1469 | MSLPAPKNLVVSRVTEDSARLSWTAPNAAFDSFEIGYFENLYLGEAIVLTVPG |
| | SERSYDLTGLKPGTEYWVQIGGVKGGNWSAPLSAIFTT |
| 1470 | MSLPAPKNLVVSRVTEDSARLSWTAPDAAFDSFEIAYQELSLWGEAIVLIVPG |
| | SERSYDLTGLKPGTEYVVFIGGVKGGVWSVPLSAIFTT |
| 1471 | MSLPAPKNLVVSRVTEDSARLSWTAPDAAFDSFFIGYLEPQPPGEAIHLFVPG |
| | SERSYDLTGLKPGTEYWVQIGGVKGGNWSAPLSAIFTT |
| 1472 | MSLPAPKNLVVSRVTEDSARLSWTAPDAAFDSFEIGYFENLYLGEAIVLIVPG |
| | SERSYDLTSLKPGTEYWVQIGGVKGGNWSAPLSAIFTT |
| 1473 | MGSLPAPKNLVVSRVTEDSARLSWTAPDAAFDSFFIGYLEPQPPGEAISLYVP |
| | GSERSYDLTGLKPGTEYNVTIQGVKGGFPSDPLVAHFTT |
| 1474 | MSLPAPKNLVVSRVTEDSARLSWTAPDAAFDSFFIGYLEPQPPGEAITLLVPG |
| | SERSYDLTGLKPGTEYNVTIQGVKGGFPSHPLVATTTT |
| 1475 | MSLPAPKNLVVSRVTEDSARLSWTAPDAAFDSFFIGYLEPQPPGEAISLYVPG |
| | SERSYDLTGLKPGTEYNVTIQGVKGGFPSEPLIANFTT |
| 1476 | MSLPAPKNLVVSRVTEDSARLSWTAPDAAFDSFEIGYFENDYFGEAIVLTVPG |
| | SERSYDLTGLKPGTEYWVQIGGVKGGNWSAPLSAIFTT |
| 1477 | MSLPAPENLVVSRVTEDSARLSWTAPDAAFDSFEIGYWENAYKGEAIVLTVPG |
| | SERSYDLTGLKPGTEYVVFIGGVKGGVWSVPLSVIFTT |
| 1478 | MSLPAPKNLVISRVTEDSARLSWTAPDAAFDSFEIVYAEPVRFGEAIVLTVPG |
| | SERSYDLTGLKPGTEYWVQIGGVKGGEWSSPLSAIFTT |
| 1479 | MSLPAPKNLVVSRVTEDSARPSWTAPDAAFDSFEIAYFERTWFGEAIVLTVPG |
| | SERSYDLTGLKPGTEYWVQIGGVKGGDWSKPLSAIFTT |
| 1480 | MGSLPAPKNLVVSRVTEDSARLSWTAPDAAFDSFEISYWEHTENGEAIILFVP |
| | GSERSYDLTGLKPGTEYWVQIGGVKGGNWSAPLSAIFTT |
| 1481 | MSLPAPKNLVVSRVTEDSARLSWTAPDAAFDSFEIGYFENPYLGEAIVLIVPG |
| | SERSYDLTGLKPGTEYWVQIGGVKGGNWSAPLSAIFTT |
| 1482 | MSLPAPKNLVVSRVTEDSARLSWTAPDAAFDSFEIGYWENAYKGEAIVLTVPG |
| | SERSYDLTGLKPGTEYRVWIGGVKGGVWSRPLSAIFTT |
| 1483 | MSLPAPKNLVVSRVTEDSARLSWTAPDAAFDSFEIGYWENAYKGEAIVLTVPG |
| | SERSYDLTGLKPGTEYVVFIGGVKGGHGSQPLSAIFTT |
| 1484 | MSLPAPKNLVVSRVTEDSARLSWTAPDAAFDSFEIGYFEHTYYGEAIVLTVPG |
| | SERSYDLTGLKPGTEYWVQIGGVKGGNWSAPLSAIFTT |
| 1485 | MSLPAPKNLVISRVTEDSARLSWTAPDAAFDSFEIGYFENLYLGEAIVLTVPG |
| | SERSYDLTGLKPGTEYWVQIGGVKGGNWSAPLSAISTT |
| 1486 | MSLPAPKNLVVSRVTEDSARLSWTAPDAAFDSFEIGYFENLYLGEAIVLTVPG |
| | SERSYDLAGLKPGTEYWVQIGGVKGGNWSAPLSAIFTT |
| 1487 | MSLPAPKNLVVSRVTEDSARLSWTAPDAAFDSFEIGYFENLYLGEAIVLTVPG |
| | SERSYDLTGLKPGTEYWVQIGGVKGGWGSNPLSAIFTT |
| 1488 | MSLPAPKNLVVSRVTEDSARLSWTAPDAAFDSFEIGYFENLYLGEAIVLTVPG |
| | SERSYDLTGLKPGTEYWVQIGGVKGGNWSEPLSAIFTT |
| 1489 | MSLPAPKNLVVSRVTEDSARLSWTAPDAAFDSFEIGYFENLYLGEAIVLTVPG |
| | SERSYDLTGLKPGTEYPVWIGGVKGGTWSVPLSTIFTT |
| 1490 | MSLPAPKNLIVSRVTEDSARLSWTAPDAAFDSFEIGYFENLYLGEAIVLTVPG |
| | SERSYDLTGLKPGTEYWVQIGGVKGSNWSAPLSAIFTT |
| 1491 | MSLPAPKNLVVSRVTEDSARLSWTAPDAAFDSFEIGYFENLYLGEAIVLTVPG |
| | SERSYDLTGLKPGTEYWVQIGGVKGGNWSAPLSAIFTT |
| 1492 | MSLPAPKNLVVSRVTEDSARLSWTAPDAAFDSFFIGYLEPQPPGEAISLLVPG |
| | SERSYDLTGLKPGTEYNVTIQGVKGGFPSEPLHAIFTT |
| 1493 | MSLPAPKNLVVSRVTEDSARLSWTAPDAAFDSFLIGYTEYSVYGEAIVLTVPG |
| | SERSYDLTGLKPGTEYTVWIMGVKGGIKSTPLSAISTT |
| 1494 | MSLPAPKNLVVSRVTEDSARLSWTAPDAAFDSFEIGYFENLYLGEAIVLTVPG |
| | YERSYDLTGLKPGTEYWVQIGGVKGGNWSAPLSAIFTT |
| 1495 | MSLPAPKNLVVSRVTEDSARLSWTAPDAAFDSFEIGYFENLYLGEAIVLTVPG |
| | SERSYDLTGLKPGTEYWVQIGGVKGSNWSAPLSAIFTT |
| 1496 | MSLPAPKNLVVSRVTEDSARLSWTAPDAAFDSFEIAYFEGTFHGEAIVLFVPG |
| | SERSYDLTGLKPGTEYAVWIGGVKGGDYSRPLSAAFTT |
| 1497 | MSLPAPKNLVVSRVTEDSARLSWTAPDAAFDSFEIGYFENLYLGEAIVLIVPG |
| | SERSYDLTGLKPGTEYYVHIGGVKGGIWSSPLSAIFTT |
| 1498 | MSLPAPKNLVVSRVTEDFARLSWTAPDAAFDSFEIAYWEQSYTGEAIVLTVPG |
| | SERSYDLTGLKPGTEYFVHIGGVKGGVWSTPLSAIFTT |
| 1499 | MSLPAPKNLVVSRVTEDSARLSWTAPDAAFDSFLIQYDEWPTYGEAIVLIVPG |
| | SERSYDLTGLKPGTEYLVEIVGVKGGNLSGPLSAIFTT |
| 1500 | MSLPAPKNLVVSRVTEDSARLSWTAPDAAFDSFEIGYFENLYLGEAIHLFVPG |
| | SERSYDLTGLKPGTEYNVTIQGVKGGFPSEPLIANFTT |
| 1501 | MSLPAPKNLVASRVTEDSARLSWTAPDAAFDSFEIGYFENLYLGEAIVLIVPG |
| | SERSYDLTGLKPGTEYWVQIGGVKGGNWSAPLSAIFTT |
| 1502 | MSLPAPKNLVVSRVTEDSARLSWTAPDAAFDSFEIGYWENAYKGEAIVLTVPG |
| | SERSYDLTGLKPGTEYVVFIGGVKGGVWSVPLSAISTT |
| 1503 | MSLPAPKNLVVSRVTEDSARLSWTAPDAAFDSFFIGYFENLYLGEAIVLTVPG |
| | SERSYDLTGLKPGTEYWVQIGGVKGGNWSAPLSAIFTT |
| 1504 | MSLPAPKNLVVSRVTEDSARLSWTAPDAAFDSFEIAYFERTWFGEAIVLTVPG |
| | SERSYDLTGLKPGTEYWVQIGGVKGGDWSRPLSAIFTT |
| 1505 | MSLRRRKTWLFLALPKTLRVCLGPRRTRRSTLSKSATSKTCTWVKRSF*PFRV |
| | LNVLTT*PV*NRVPNTRLRSPVLKVVRCLTRCLRSSPPVG |
| 1506 | MSLPAPKNLVVSRVTEDSARLSWTAPDAAFDSFEIVYAEPVRFGEAIVLIVPG |
| | SERSYDLTGLKPGTEYWVQIGGVKGGEWSSLLSAIFTT |
| 1507 | MSLPAPKNLVVSRVTEDSARLSWTAPDAAFDSFEIGYFENLYLGEAIVLIVPG |
| | SERYYDLTGLKPGTEYWVQIGGVKGGNWSAPLSAIFTT |
| 1508 | MSLPAPKNLVVSRVTEDSARLSWTAPDAAFDSFEIGYFENLYLGEAIVLTVPG |
| | SERSYDLTGLKPGTEYWVQIGGAKGGNWSAPLSAIFTT |
| 1509 | MSLPAPKNLVVSRVTEDSARLSWTAPDAAFDSFEIDYGEYSQAGEAIGLLVPG |
| | SERSYDLTGLKPGTEYWVQIGGVKGGNWSAPLSAIFTT |
| 1510 | MSLPAPKNLVVSRVTEDSARLSWTAPDAAFDSLEIGYFENLYLGEAIVLTVPG |
| | SERSYDLTGLKPGTEYWVQIGGVKGGNWSAPLSAIFTT |
| 1511 | MSLPAPKNLVVSRVTEDSARLSWTAPDAAFDSFEIAYFEQTYTGEAIVLIVPG |
| | SERSYDLTGLKPGTEYWVQIGGVKGGTWSAPLSAISTT |
| 1512 | MSLPAPKNLVVSRVTEDSARLSWTAPDAAFDSFEIAYFEQTYTGEAIVLIVPG |
| | SERSYDLTGLKPGTEYWVAIGGVKGGLWSLPLSAIFTT |
| 1513 | MSLPAPKNLVVSRVTEDSARLSWTAPDAAFDSFEIAYHEDDFYGEAIALLVPG |
| | SERSYDLTGLKPGTEYIVHIGGVKGGFFSSPLYAWFTT |
| 1514 | MSLPAPKNLVVSRVTEDSARLSWTAPDAAFDSFAIMYGERGNPGEAIVLTVPG |
| | SERSYDLIGLKPGTEYAVWIYGVKGGNYSYPLSAIFTT |
| 1515 | MSLPAPKNLVVSRVTEDSARLSWTAPDAAFDSFEIAYWEQSYTGEAIVLTVPG |
| | SERSYDLTGLKPGTEYWVQIGGVKGGNWSAPLSAIFTT |
| 1516 | MSLPAPKNLVVSRVTEDSARLSWTAPDAAFDSFFIGYLEPRPPGEAIHLYVPG |
| | SERSYDLTGLKPGTEYNITIQGVKGGFPSIPLIASFTT |
| 1517 | MSLPAPKNLVVSRVTEDSARLSWTAPDAAFDSFFIGYLEPQPPGEAITLYVPG |
| | SERSYDLTGLKPGTEYNVTIQGVKGGFPSGPLIASFTT |
| 1518 | MSLPAPKNLVVSRVTEDSARLSWTAPDAAFDSFEIAYFERTWFGEAIVLTVPG |
| | SERSYDLTGLKPGTEYWVAIGGVKGGLWSLPLSVIFTT |
| 1519 | MSLPAPKNLVVSRVTEDSARLSWTAPDAAFDSFEIGYWENAYKGEAIVLTVPG |
| | SERSYDLTGLKPGTEYVVFIGGVKGGGWSGPLSAIFTT |
| 1520 | MSLPAPKNLVVSRVTEDSARLSWTAPDAAFDSFEIGYFENLYLGEAIVLTVPG |
| | SERSYDLTGLKPGTEYWVQIGGVKGGNWSAPLSAIFTT |
| 1521 | MSLPAPKNLVISRVTEDSARLSWTAPDAAFDSFEIGYFENLYLGEAIVLTVPG |
| | SERSYDLTGLKPGTEYWVAIGGVKGGLWSLPLSAIFTT |
| 1522 | MSLPAPKNLVVSRVTEDSARLSWTAPDAAFDSFEIAYAELSTGEAIVLTVPGS |
| | ERSYDLTGLKPGTEYYVHIGGVKGGSWSIPLSAIFTT |
| 1523 | MSLPAPKNLVVSRVTEDSARLSWTAPDAAFDSFEIGYWENAYKGEAIVLTVPG |
| | SERSYDLTGLKPGTEYVVFIGGVKGGVWSKPLSVIFTT |
| 1524 | MSLPAPKNLVVSRVTEDSARLSWTAPDAAFDSFSIMYAEQKVNGEAIVLIVPG |
| | SERSYDLTGLKPGTEYLVLIWGVKGGGRSLPLSAIFTT |
| 1525 | MSLPAPKNLIVSRVTEDSARLSWTAPDAAFDSLEIGYFENLYLGEAIVLTVPG |
| | SERSYDLTGLKPGTEYWVQIGGVKGGNWSAPLSAIFTT |
| 1526 | MSLPAPKNLVVSRVTEDSARLSWTAPDAAFDSFFIGYLEPQPPGEAIHLFVPG |
| | SERSYDLTGLKPGTEYNVTIQGVKGGFPSEPLIANSTT |
| 1527 | MSLPAPKNLVVSRVTEDSARLSWTAPDAAFDSFEISYWEHTENGEAIILFVPG |
| | SERSYDLTGLKPGTEYVVFIGGVKGGVWSVPLSAIFTT |
| 1528 | MSLPAPKNLVVSRVTEDSARLSWTAPDAAFDSFFIGYLEPQPPGEAIHLSVPG |
| | SERSYDLTGLKPGTEYWVQIGGVKGGNWSAPLSAIFTT |
| 1529 | MSLPAPKNLVVSRVTEDSARLSWTAPDAAFDSFFIGYLEPQPPGEAIALYVPG |
| | SERSYDLTGLKPGTEYNVTIQGVKGGFPSEPLVAHFTT |
| 1530 | MSLPAPKNLVVSRVTEDSARLSWTAPDAAFDSFEIVYAEPVRFGEAIVLIVPG |
| | SERSYDLTGLKPGTEYWVQIGGVKGGNWSAPLSAIFTT |
| 1531 | MSLPAPKNLVVSRVTEDSARLSWTEPDAAFDSFEIGYFENLYLGEAIVLTVPG |
| | SERSYDLTGLKPGTEYWVQIGGVKGGNWSAPLSAIFTT |
| 1532 | MSLPAPKNLVVSRVTEDSARLSWTAPDAAFDSFEIAYFERTWFGEAIVLTVPG |
| | SERSYDLTGLKPGTEYWVQIGGVKGGDWSKPLSAIFTT |
| 1533 | MSLPAPKNLVVSRVTEDSARLSWTAPDAAFDSFEIGYFENDYFGEAIVLTVPG |
| | SERSYDLTGLKPGTEYVVFIGGVKGGKWSAPLSAIFTT |
| 1534 | MSLPAPKNLVVSRVTEDSARLSWTAPDAAFDSFEIVYQENSAYGEAIVLTVPG |
| | SERSYDLTGLKPGTEYWVQIGGVKGGNWSAPLSAIFTT |
| 1535 | MSLPAPKNLVVSRVTEDSARLSWTAPDAAFDSFHIWYFEKANEGEAIPLVVPG |
| | SERSYDLTGLKPGTEYDVDIGGVKGGAWSIPLGARFTT |
| 1536 | MSLPAPKNLVVSRVTEDSARLSWTAPDAAFDSFMIAYDEFIVWGEAVVLTVPG |
| | SERSYDLTGLKPGTEYLVEILGVKGGTISGPLSAIFTT |
| 1537 | MSLPAPKNLVVSRVTEDSARLSWTAPDAAFDSFEIGYFENLYLGEAIVLTVPG |
| | SERSYDLTGLKPGTKYWVQIGGVKGGNWSAPLSAIFTT |
| 1538 | MSLPAPKNLVVSRVTEDSARLSWTAPDAAFDSFFIGYLEPQPPGEAIHLYVPG |
| | SERSYDLTGLKPGTEYNVTIQGVKGGEWSAPLSAIFTT |
| 1539 | MSLPAPKNLVVSRVTEDSARLSWTAPDAAFDSFEIGYFENLYLGEAIVLTVPG |
| | SERSYDLTGLKPGTEYVVFIGGVKGGEYSIPLSAIFTT |
| 1540 | MSLPAPKNLVVSRVTEDSARLSWTAPDAAFDSFEISYWEHTENGEAIILFVPG |
| | SERSYDLTGLKPGTEYYVTIGGVKGGAWSPPLWAHFTT |
| 1541 | MSLPAPKNLVVSRVTEDSARLSWTAPDAAFDSFEIAYQELSLWGEAIVLIVPG |
| | SERSYDLTGLKPGTEYYVHIGGVKGGIWSSPLSAYFTT |
| 1542 | MSLPAPKNLVVSRVTEDSARLSWTAPDAAFDSFEIGYFENLYLGEAIVLTVPG |
| | SERSYDLTGLKPGTEYWVQIGGVKGGEWSAPLSAIFTT |
| 1543 | MSLPAPKNLVVSRVTEDSARLSWTAPDAAFDSFEIGYFENLYLGEAIVLTVPG |
| | SERSYDLTGLKPGTEYVVFIGGVKGGDFSPPLSAIFTT |
| 1544 | MSLPAPKNLVVSRVTEDSARLSWTAPDAAFDSFEIGYWENAYRGEAIVLTVPG |
| | SERSYDLTGLKPGTEYVVFIGGVKGGVWSVPLSAIFTT |
| 1545 | MSLPAPKNLVVSRVTEDSARLSWTAPDAAFDSFEIGYFENLYLGEAIVLIVPG |
| | SERSYDLTGLKPGTEYWVQIGGVNGGNWSAPLSAIFTT |
| 1546 | MSLPAPKNLVVSRVTEDSARLSWTAPDAAFDSFEIGYFENLYLGEAIVLTVPG |
| | SERSYDLTGLKPGTEYWVQIGGVKGGNWSAPLVATFTT |
| 1547 | MSLPAPKNLVVSRVTEDSARLSWTAPDAAFDSFEIGYFENLYLGEAIVLTVPG |
| | SERSYDLTGLKPGTEYWVQIGGVKGGNWSAPLSAIFTT |
| 1548 | MSLPAPKNLVVSRVTEDSARLSWTAPDAAFDSFDINYWENESGGEAIALFVPG |
| | SERSYDLTGLKPGTEYWVSIGGVKGGRFSEPLYARFTT |
| 1549 | MSLPAPKNLVVSRVTEDSARLSWTAPDAAFDSFEIGYFENLYLGEAIVLWVPG |
| | SERSYDLTGLKPGTEYWVQIGGVKGGNWSAPLSAIFTT |
| 1550 | MSLPAPKNLVVSRVTEDSARLSWTTPDAAFDSFEIAYFEIAWLGEAIVLTVPG |
| | SERSYDLTGLKPGTEYWVQIGGVKGGAYSTPLSAIFTT |
| 1551 | MSLPVPKNLVVSRVTEDSARLSWTAPDAAFDSFEIGYFENLYLGEAIVLTVPG |
| | SERSYDLTGLKPGTEYWVQIGGVKGGNWSAPLSAIFTT |
| 1552 | MSLPAPKNLVVSHVTEDSARLSWTAPDAAFDSFEIGYWENAYKGEAIVLTVPG |
| | SERSYDLTGLKPGTEYVVFIGGVKGGVWSVPLSAIFTT |
| 1553 | MSLPAPKNLVVSRVTEDSARLSWTAPDAAFDSFFIGYLEPQPPGEAIVLGVPG |
| | SERSYDLTGLKPGTEYNVTIQGVKGGFPSDPLVASFTT |
| 1554 | MSLPAPKNLVVSRVTEDSARLSWTAPDAAFDSFYIAYAEPRPDGEAILLEVPG |
| | SERSYDLTGLKPGTEYSVLIHGVKGGLLSSPLSATFTT |
| 1555 | MSLPAPKNLVVSRITEDSARLSWTAPDAAFDSFEIGYFENLYLGEAIVLTVPG |
| | SERSYDLTGLKPGTEYWVQIGGVKGGNWSAPLSAIFTT |
| 1556 | MSLPAPKNLVVSRVTEDSARLSWTAPDAAFDSFYIAYAEPRPDGEAILLWVPG |
| | SERSYDLTGLKPGTEYSVLIHGVKGGLLSSPLHAYFTT |
| 1557 | MSLPAPKNLVVSRVTEDSARLSWTAPDAAFDSFFIGYLEPQPPGEVIHLFVPG |
| | SERSYDLTGLKPGTEYNVTIQGVKGGFPSDPLVASFTT |
| 1558 | MSLPAPKNLVVSRVTEDSARLSWTAPDAAFDSFEIGYFENLYLGEAIVLTVPG |
| | SERSYDLTGLKPGTEYWVQIGGVKGGNWSSPLSAIFTT |
| 1559 | MSLPAPKNLVVSRVTEDSARLSWTAPDAAFDSFFIGYLEPQPPGEAIALYVPG |
| | SERSYDLTGLKPGTEYNVTIQGVKGGFPSEPLVVHFTT |
| 1560 | MSLPAPKNLVVSRVTEDSARLSWTAPDAAFDSFFIGYLEPQPPGEAISLYVPG |
| | SERSYDLTGLKPGTEYNVTIQGVKGGFPSDPLVAHFTT |
| 1561 | MSLPAPKNLVVSRVTEDSARLSWTAPDAAFDSFFIGYLEPQPPGEAIYLLVPG |
| | SERSYDLIGLKPGTEYNVTIQGVKGGFPSLPLVATFTT |
| 1562 | MSLPAPKNLVVSRVTEDSARLSWTAPDAAFDSFEISYWEHTENGEAIILFVPG |
| | SERSYDLIGLKPGTEYYVTIGGVKGGAWSPPLWAEFTT |
| 1563 | MSLPAPKNLVVSRVTEDSARLSWTAPDAAFDSFEIGYFENLYLGEAIVLTVPG |
| | SERSYDPTGLKPGTEYWVQIGGVKGGNWSAPLSAIFTT |
| 1564 | MSLPAPKNLVVSRVTEDSARLSWTAPDAAFDSFEIGYFENDYFGEAIVLTVPG |
| | SERSYDLTGLKPGTEYVVFIGGVKGGNWSAPLSAIFTT |
| 1565 | MSLPAPKNLVVSRVTEDSARLSWTAPDAAFDSFFIGYLEPQPPGEAIHLYVPG |
| | SERSYDLTGLKPGTEYNVTIQGVKGGFPSEPLIANSTT |
| 1566 | MSLPAPKNLVVSRITEDSARLSWTAPDAAFDSFEIGYWENAYKGEAIVLTVPG |
| | SERSYDLTGLKPGTEYVVFIGGVKGGVWSVPLSAIFTT |
| 1567 | MSLPAPKNLVVSRVTEDSARLSWTAPDAAFDSFEIAYGEAAYDGEAIALLVPG |
| | SERSYDLTGLKPGTEYWVQIGGVKGGNWSAPLSAIFTT |
| 1568 | MLPAPKNLVVSRVTEDSARLSWTAPDAAFDSFEISYWEHTENGEAIILFVPGS |
| | ERSYDLTGLKPGTEYYVTIGGVKGGAWSPPLWAEFTT |
| 1569 | MSLPAPKNLVVSRVTEDSARLSWTAPDAAFDSFEIVYWEQVGVGEAIVLTVPG |
| | SERSYDLTGLKPGTEYWVQIGGVKGGGFSEPLSAIFTT |
| 1570 | MSLPAPKNLVVSRVTEDSARLSWTAPDAAFDSFEIGYFENLYLGEAIVLTVPG |
| | SERSYDLTGLKPGTEYWVQIGGVKGGNWSAPLVAEFTT |
| 1571 | MSLPAPKNLVVSRVTEDSARLSWTAPDAAFDSFEIAYFELDYVGEAIVLTVPG |
| | SERSYDLTGLKPGTEYWVQIGGVKGGTWSGPLSAIFTI |
| 1572 | MSLPAPKNLVVSRVTEDSARLSWTAPDAAFDSFEIGYFELTYYGEAIVLTVPG |
| | SERSYDLTGLKPGTEYWVQIGGVKGGGFSEPLSAIFTT |
| 1573 | MSLPAPKNLVVSRVTEDSARLSWTAPDAAFDSFEIGYFENLYLGEAIVLIVPG |
| | SERSHDLTGLKPGTEYWVQIGGVKGGNWSAPLSAIFTT |
| 1574 | MSLPAPKNLVVSRVTEDSARLSWTAPDAAFDSFFIGYLEPQPPGEAIHLYVPG |
| | SERSYDLTGLKPGTEYNVTIQGVKGGNWSAPLSAIFTT |
| 1575 | MSLPAPKNLVVSRVTEDSARLSWTALDAAFDSFEIGYFENLYLGEAIVLTVPG |
| | SERSYDLTGLKPGTEYWVQIGGVKGGNWSAPLSAIFTT |
| 1576 | MSLPAPKNLVVSRVTEDSARLSWTAPDAAFDSFFIGYLEPQPPGEAIALYVPG |
| | SERSYDLTGLKPGTEYNVTIQGVKGGFPSEPLIANFTT |
| 1577 | MSLPAPKNLVVSRVTEDSARLSWTAPDAAFDSFDIGYFELTWYGEAIVLIVPG |
| | SERSYDLTGLKPGTEYWVSIGGVKGGRFSEPLYARFTT |
| 1578 | MSLPAPKNLVVSRVTEDSARLSWTAPDAAFDSFEIAYQELSLWGEAIVLTVPG |
| | SERSYDLTGLKPGTEYYVHIGGVKGGIWSSPLSAYSTT |
| 1579 | MSLPAPKNLVVSRVTEDSARLSWTAPDAAFDSFEIGYWENAYKGEAIVLTVPG |
| | SERSYDLTGLKPGTEYMVFIGGVKGGVWSVPLSAIFTT |
| 1580 | MSLPAPKNLVVSRVTEDSARLSWTATDAAFDSFEIGYWENAYKGEAIVLIVPG |
| | SERSYDLTGLKPGTEYVVFIGGVKGGVWSVPLSAIFTT |
| 1581 | MSLPAPKNLVVSRVTEDSARLSWTAPDAAFDSFEIVYAEPVRFGEAIVLIVPG |
| | SERSYDLTGLKPGTEYWVQIGGVKGGEWSSPLSAIFTT |
| 1582 | MSLPAPKNLVVSRVTEDSARLSWTAPDAAFDSFEIGYFENLYLGEAIVLTVPG |
| | SERSYDLTGLKPGTEYWVQIGGVKGGNWSAPLSAIFTT |
| 1583 | MSLPAPKNLVVSRITEDSARLSWTAPDAAFDSFEIGYFENLYLGEAIVLTVPG |
| | SERSYDLTGLKPGTEYWVQIGGVKGGNWSAPLSAIFTT |
| 1584 | MSLPAPKNLVVSRVTEDSARLSWTAPDAAFDSFEIAYFEIAWLGEAIVLTVPG |
| | SERSYDLTGLKPGTEYWVQIGGVKGGAYSTPLSAIFTT |
| 1585 | MSLPAPKNLVVSRVTEDSARLSWTAPDAAFDSFFIGYLEPQPPGEAIHLYVPG |
| | SERSYDLIGLKPGTEYNVTIQGVKGGFPSEPLVATFTT |
| 1586 | MSLPAPKNLVVSRITEDSARLSWTAPDAAFDSFEIGYFENLYLGEAIVLTVPG |
| | SERSYDLTGLKPGTEYWVQIGGVKGGNWSAPLSAIFTT |
| 1587 | MSLPAPKNLVVSRVTEDSARLSWTAPDAAFDSFEIGYWENAYKGEAIVLIVPG |
| | SERSYDLTGLKPGTEYVVFIGGVKGGVWSVSLSAIFTT |
| 1588 | MSLPAPKNLVVSRVTEDSARLSWTAPDAAFDSFFIGYLEPQPPGEAIDLYVPG |
| | SERSYDLTGLKPGTEYNVTIQGVKGGFPSHPLVATFTT |
| 1589 | MSLPAPKNLVVSRVTEDSARLSWTAPDAAFDSFFIGYLEPQPLGEAIHLFVPG |
| | SERSYDLTGLKPGTEYNVTIQGVKGGFPSEPLIASFTT |
| 1590 | MSLPAPKNLVVSRVTEDSARLSWTAPDAAFDSFFIGYLEPQPPGEAIDLYVPG |
| | SERSYDLTGLKPGTEYNVTIQGVKGGFPSEPLVATFTT |
| 1591 | MSLPAPKNLVVSRVTEDSARLSWTAPDAAFDSFDIGYFELTWYGEAIVLIVPG |
| | SERSYDLTGLKPGTEYWVSIGGVKGGIWSSPLSAIFTT |
| 1592 | MSLPAPKNLVVSRVTEDSARLSWTAPDAAFDSFEISYFENTWYGEAIVLIVPG |
| | SERSYDLTGLKPGTEYSVRIFGVKGGNFSFPLSAIFTT |
| 1593 | MSLPAPKNLVVSRVTEDSARLSWTAPDAAFDSFEIGYFENLYLGEAIVLTVPG |
| | SERSYDLTGLKPGTEYWVQIGGVKGDNWSAPLSAIFTT |
| 1594 | MSLPAPKNLVVSRVTEDSARLSWTAPDAAFDSFEIAYFENLYLGEAIVLTVPG |
| | SERSYDLTGLKPGTEYWVQIGGVKGGNWSAPLSAIFTT |
| 1595 | MSLPAPKNLVVSRVTEDSARLSWTAPDAAFDSFEIGYFEATPNGEAIVLTVPG |
| | SERSYDLTGLKPGTEYKVFIGGVKGGRWSKPLSAIFTT |
| 1596 | MSLPAPKNLVVSRVTEDSARLSWTTPDAAFDSFEIGYFENLYLGEAIVLTVPG |
| | SERSYDLTGLKPGTEYWVQIGGVKGGNWSAPLSAIFTT |
| 1597 | MSLPAPKNLVVSRVTEDSARLSWTAPDAAFDSF*ISYKESFTYGEAIVLTVPG |
| | SERSYDLTGLKPGTEYLVEIVGVKGGNLSGPLSAIFTT |
| 1598 | MSLPAPKNLVVSRVTEDSARLSWTAPDAAFDSFWIEYWEGWKSGEAIVLTVPG |
| | SERSYDLTGLKPGTEYRVHIWGVKGGIVSWPLSAIFTT |
| 1599 | MSLPAPKNLVVSRVTEDSARLSWTAPDAAFDSFEIGYFENLYLGEAIVLTVPG |
| | SERSYDLTGLKPGTEYVVFIGGVKGGVWSVPLSAIFTT |
| 1600 | MSLPAPKNLVVSRVTEDSARLSWTAPDAAFDSFEIAYFEQTYTGEAIVLTVPG |
| | SERSYDLTGLKPGTEYWVQIGGVKGGNWSAPLSAIFTT |
| 1601 | MSLPAPKNLVVSRVTEDSARLSWTAPDAAFDSFEIGHFENLYLGEAIVLTVPG |
| | SERSYDLTGLKPGIEYWVQIGGVKGGVWSVSLSAIFTT |
| 1602 | MSLPAPKNLVVSRVTEDSARLSWTAPDAAFNSFEIGYFENLYLGEAIVLTVPG |
| | SERSYDLTGLKPGTEYWVQIGGVKGGTFSAPLSAIFTT |
| 1603 | MSLPAPKNLVVSRVTEDSARMSWTTPDAAFDSFEIGYFENLYLGEAIVLTVPG |
| | SERSYDLTGLKPGTEYWVQIGGVKGGNWSAPLSAIFTT |
| 1604 | MSLPAPENLVVSRVTEDSARLSWTAPDAAFDSFEIGYFENLYLGEAIVLIVPG |
| | SERSYDLTGLKPGTEYWVQIGGVKGGNWSAPLSAIFTT |
| 1605 | MSLPAPKNLVVSRVTEDSARLSWTAPDAAFDSFEIDYGEYSQAGEAIGLLVPG |
| | SERSYDLTGLKPGTEYAVWIGGVKGGFFSTPLEADFTT |
| 1606 | MSLPAPKNLVVSRVTEDSARLSWTAPDAAFDSFEIGYWENAYKGEAIVLTVPG |
| | SERSYDLTGLKPGTEYVVFIGGVKGGSWSNPLSAIFTT |
| 1607 | MSLPAPKNLVVSRVTEDSARLSWTAPDAAFDSFEIGYFENLYLGEAIVLTIPG |
| | SERSYDLTGLKPGTEYWVQIGGVKGGNWSAPLSAIFTT |
| 1608 | MSLPAPKNLVVSRVTEDSARLSWTAPDAAFDSFEIAYFENDWAGEAIVLTIPG |
| | SERSYDLTGLKPGTEYWVQIGGVKGGNWSAPLSAIFTT |
| 1609 | MGSLPAPKNLVVSRVTEDSARLSWTAPDAAFDSFEIGYFENLYLGEAIVLTVP |
| | GSERSYDLTGLKPGTEYWVQIGGVKGGNWSAPLSAIFTT |
| 1610 | MSLPAPKNLVVSRVTEDSARLSWTAPDAAFDSFEIGYFENLYLGEAIVLIVPG |
| | SERSYDLTGLKPGTEYWVQIGGVKGGNWSAPLSAISTT |
| 1611 | MSLPAPKNLVISRVTEDSARLSWTAPDAAFDSFEIGYFENLYLGEAIVLIVPG |
| | SERSYDLTGLKPGTEYWVQIGGVKGGNWSAPLSAIFTT |
| 1612 | MSLPAPKNLVVSRVTEDSARLSWTAPDAAFDSFEIGYFENLYLGEAIVLIVPG |
| | SERSYDLTGLKPGTEYWVQIGGVKGGNWSAPLSAIFTT |
| 1613 | MSLPAPKNLVVSRVTEDSARLSWTAPDAAFDSFEIGYFENLYLGEAIVLTVPG |
| | SERSYDLTGLKPGTEYRVVILGVKGGW*SGPLSAIFTT |
| 1614 | MSLPAPKNLVVSRVTEDSARLSWTAPGAAFDSFEIGYFENLYLGEAIVLTVPG |
| | SERSYDLTGLKPGTEYWVQIGGVKGGVWSVPLSAIFTT |
| 1615 | MSLPVPKNLVVSRVTEDSARLSWTAPDAAFDSFEIGYWENAYKGEAIVLIVPG |
| | SERSYDLTGLKPGTEYWVQIGGVKGGNWSAPLSAIFTT |
| 1616 | MSLPAPKNLVVSRVTEDSARLSWTAPDAAFDSFEIGYFENLYLGEAIVLIVPG |
| | SERSYDLTGLKPGTEYWVQIGGVKGGNWSAPLSAIFTT |
| 1617 | MSLPAPKNLVVSRVTEDSARLSWTAPDAAFDSFEIGYFEITRYGEAIILFVPG |
| | SERSYDLTGLKPGTEYWVQIGGVKGGNWSAPLSAIFTT |
| 1618 | MSLPAPKNLVVSRVTEDSARLSWTAPDAAFDSFEIGYFENLYLGEAIVLTVPG |
| | SERSYDLTGLKPGTEYWVQIGGVKGGNWSGPLSAIFTT |
| 1619 | MSLPAPKNLVVSRITEDSARLSWTAPDAAFDSFEIGYFENLYLGEAIVLTVPG |
| | SERSYDLTGLKPGTEYWVQIGGVKGGNWSAPLSAISTT |
| 1620 | MSLPAPKNLVVSRVTEDSARLSWTAPDAAFDSFEIGYFENLYLGEAIVLTVPG |
| | SERSYDLTGLKPGTEYWVQIGGVKGGNWSAPLSEIFTT |
| 1621 | MSLPAPKNLVVSRVTEDSARLSWTAPDAAFDSFEIGYWENAYKGEAIVLTVPG |
| | SERSYDLTGLKPGTEYWVQIGGVKGGVWSTPLSAIFTT |
| 1622 | MSLPAPKNLVVSRVTEDSARLSWTAPDAAFDSFEIGYWENAYKGEAIVLTVPG |
| | SERSYDLTGLKPGTEYWVQIGGVKGGNWSAPLSAIFTT |
| 1623 | MSLPAPKNLVVSRVTEDSARLSWTAPDAAFDSFEIGYFGNLYLGEAIVLTVPG |
| | SERSYDLTGLKPGTEYWVQIGGVKGGNWSAPLSAIFTT |
| 1624 | MSLPAPKNLVVSRVTEDSARLSWTAPDAAFDSFDIGYFEATYYGEAIVLTVPG |
| | SERSYDLIGLKPGTEYRVWIGGVKGGYYSNPLSAIFTT |
| 1625 | MSLPAPKNLVVSRVTEDSARLSWTAPDAAFDSFEIGYFENLYLGEAIVLIVPG |
| | SERSYDLTGLKPGTEYWVQIGGVKGGNWSAPLSAIVTT |
| 1626 | MSLPAPKNLVVSRVTEDSARLSWTAPDAAFDSFFIGYLEPQPPGEAIHLYVPG |
| | SERSYDLTGLKPGTEYNVTIQGVKVGFPSEPLIANFTT |
| 1627 | MSLPAPKNLVVSRVTEDSARLSWTAPDAAFDSFEIGYWEGPGGGEAIILVVPG |
| | SERSYDLTGLKPGTEYYVQIGGVKGGDWSTPLWATFTT |
| 1628 | MSLPAPENLVVSRVTEDSARLSWTAPDAAFDSFFIGYLEPQPPGEAIALYVPG |
| | SERSYDLTGLKPGTEYNVTIQGVKGGFPSLPLVATFTT |
| 1629 | MSLPAPKNLVVSRVTEDSARLSWTAPDAAFDSFEIAYQELSLWGEAIVLTVPG |
| | SERSYDLTGLKPGTEYWVQIGGVKGGIWSSPLVASFTT |
| 1630 | MSLPAPKNLVVSRVTEDSARLSWTAPDAAFDSFFIGYLEPQPPGEAIDLYVPG |
| | SERSYDLTGLKPGTEYNVTIQGVKGGFPSLPLVATFTT |
| 1631 | MSLPAPKNLVVSRVTEDSARLSWTAPDAAFDSFNIMYHEHYDNGEAIVLTVPG |
| | SERSYDLTGLKPGTEYSVVINGVKGGPHSAPLSAIFTT |
| 1632 | MSLPAPKNLVVSRVTEDSARLSWTAPDAAFDSFFIGYLEPQPPGEAIHLYVPG |
| | SERSYDLTGLKPGTEYNVTIQGVKGGFPSIPLIASFTT |
| 1633 | MSLPAPKNLVVSRVTEDSARLSWTAPDAAFDSFEIGYFENLYLGEAIVLTVPG |
| | SERSYDLTGLKPGTEYCVYICGVKGGRDSMPLSAIFTT |
| 1634 | MSLPAPKNLVVSRVTEDSARLSWTAPDAAFDSFEIGYWEMSYYGEAIVLIVPG |
| | SERSYDLTGLKPGTEYGVSIGGVKGGRWSLPLSAIFTT |
| 1635 | MSLPAPKNLVVSRVTEDSSRLSWTAPDAAFDSFEIGYFENLYLGEAIVLTVPG |
| | SERSYDLTGLKPGTEYWVQIGGVKGGNWSAPLSAIFTT |
| 1636 | MSLPAPKNLVVSRVTEDSARLSWTAPDAAFDSFFIGYLEPQPPGEAIELYVPG |
| | SERSYDLTGLKPGTEYNVTIQGVKGGFPSLPLVAIFTT |
| 1637 | MSLPAPKNLVVSRVTEDSARLSWTAPDAAFDSFFIGYLEPQPPGEAIVLTVPG |
| | SERSYDLTGLKPGTEYNVTIQGVKGGFPSEPLIANFTT |
| 1638 | MSLPAPKNLVVSRVTEDSARLSWTAPDAAFDSFFIGYLEPQPPGEAIALWVPG |
| | SERSYDLTGLKPGTEYNVTIQGVKGGFPSEPLVATFTT |
| 1639 | MSLPAPKNLFVSRVTEDSARLSWTAPDAAFDSFEIGYWENAYKGEAIVLIVPG |
| | SERSYDLTGLKPGTEYWVQIGGVKGGNWSAPLSAIFTT |
| 1640 | MSLPAPKNLVVSRVTEDSAHLSWTAPDAAFDSFEIGYFENDYFGEAIVLIVPG |
| | SERSYDLTGLKPGTEYVVFIGGVKGGKWSAPLSAIFTT |
| 1641 | MLPAPKNLVVSRVTEDSARLSWTAPDAAFDSFFIGYLEPQPPGEAISLFVPGS |
| | ERSYDLTGLKPGTEYNVTIQGVKGGFPSDPLNATENT |
| 1642 | MLPAPKNLVVSRVTEDSARLSWTAPDAAFDSFFIGYLEPQPPGEAIGLFVPGS |
| | ERSYDLTGLKPGTEYNVTIQGVKGGFPSEPLKAAFTT |
| 1643 | MLPAPKNLVVSRVTEDSARLSWTAPDAAFDSFEISYFENTWYGEAIVLTVPGS |
| | ERSYDLTGLKPGTEYVVWIGGVKGGLWSKPLSAIFTT |
| 1644 | MLPAPKNLVVSRVTEDSARLSWTAPDAAFDSFFIGYLEPQPPGEAIELYVPGS |
| | ERSYDLTGLKPGTEYNVTIQGVKGGFPSEPLIAHFTT |
| 1645 | MLPAPKNLVVSRVTEDSARLSWTAPDAAFDSFFIGYLEPQPPGEAISLFVPGS |
| | ERSYDLTGLKPGTEYNVTIQGVKGGFPSMPLVAQFTT |
| 1646 | MLPAPKNLVVSRVTEDSARLSWTAPDAAFDSFFIGYLEPQPPGEAITLAVPGS |
| | ERSYDLTGLKPGTEYNVTIQGVKGGFPSNPLLAAFTT |
| 1647 | MLPAPKNLVVSRVTEDSARLSWTAPDAAFDSFEIAYQELSLWGEAIVLTVPGS |
| | ERSYDLTGLKPGTEYYVHIGGVKGGIWSSPLSAIFTT |
| 1648 | MLPAPKNLVVSRVTEDSARLSWTAPDAAFDSFFIGYLEPQPPGEAIGLFVPGS |
| | ERSYDLTGLKPGTEYNVTIQGVKGGFPSNPLEARFTT |
| 1649 | MLPAPKNLVVSRVTEDSARLSWTAPDAAFDSFFIGYLEPQPPGEAIQLWVPGS |
| | ERSYDLTGLKPGTEYNVTIQGVKGGFPSLPLVATFTT |
| 1650 | MLPAPKNLVVSRVTEDSARLSWTAPDAAFDSFFIGYLEPQPPGEAIHLYVPGS |
| | ERSYDLTGLKPGTEYNVTIQGVKGGFPSHPLYADFTT |
| 1651 | MLPAPKNLVVSRITEDSARLSWTAPDAAFDSFFIGYLEPQPPGEAITLLVPAS |
| | ERSYDLTGLKPGTEYNVTIQGVKGGFPSHPLQAQFTT |
| 1652 | MLPAPKNLVVSRVTEDSARLSWTAPDAAFDSFFIGYLEPQPPGEAIGLFVPGS |
| | ERSYDLTGLKPGTEYNVTIQGVKGGFPSDPLVAYFTT |
| 1653 | MLPAPKNLVVSRVTEDSARLSWTAPDAAFDSFEIGYWENAYKGEAIVLTVPGS |
| | ERSYDLTGLKPGTEYVVFIGGVKGGVWSVPLSAIFTT |
| 1654 | MLPAPKNLVVSRVTEDSARLSWTAPDAAFDSFLIPYAETSPSGEAIVLTVPGS |
| | ERSYDLTGLKPGTEYSVLIHGVKGGDYSSPLSAIFTT |
| 1655 | MLPAPKNLVVSRVTEDSARLSWTAPDAAFDSFFIGYLEPQPPGEAISLYVPGS |
| | ERSYDLTGLKPGTEYNVTIQGVKGGFPSHPLLAVFTT |
| 1656 | MLPAPKNLVVSRVTEDSARLSWTAPDAAFDSFFIGYLEPQPPGEAIQLFVPGS |
| | ERSYDLTGLKPGTEYNVTIQGVKGGFPSIPLSALFTT |
| 1657 | MLPAPKNLVVSRVTEDSARLSWTAPDAAFDSFEIAYWENNENGEAIILIVPGS |
| | ERSYDLTGLKPGTEYVVFISGVKGGTWSYPLVAQFTT |
| 1658 | MLPAPKNLVVSRVTEDSARLSWTAPDAAFDSFFIGYLEPQPPGEAIDLWVPGS |
| | ERSYDLTGLKPGTEYNVTIQGVKGGFPSLPLSAIFTT |
| 1659 | MLPAPNNLVVSRVTEDSARLSWTAPDAAFDSFFIGYLEPQPPGEAIHLFVPGS |
| | ERSYDLTGLKPGTEYNVTIQGVKGGFPSGPLHATFTT |
| 1660 | MLPAPKNLVVSRVTEDSARLSWTAPDAAFDSFFIGYLEPQPPGEAIVLWVPGS |
| | ERSYDLTGLKPGTEYNVTIQGVKGGFPSHPLVAKFTT |
| 1661 | MLPAPKNLVVSRVTEDSARLSWTAPDAAFDSFFIGYLEPQPPGEAIDLWVPGS |
| | ERSYDLTGLKPGTEYNVTIQGVKGGFPSNPLKAQFTT |
| 1662 | MLPAPKNLVVSRVTEDSARLSWTAPDAAFDSFYIAYAEPRPDGEAILLVVPGS |
| | ERSYDLTGLKPGTEYSVLIHGVKGGLLSSPLVAFFTT |
| 1663 | MLPAPKNLVVSRVTEDSARLSWTAPDAAFDSFFIGYLEPQPPGEAITLTVPGS |
| | ERSYDLTGLKPGTEYNVTIQGVKGGFPSGPLIASFTT |
| 1664 | MLPAPKNLVVSRVTEDSARLSWTAPDAAFDSFFIGYLEPQPPGEAIVLWVPGS |
| | ERSYDLTGLKPGTEYNVTIQGVKGGFPSHPLVAKSTT |
| 1665 | MLPAPKNLVVSRVTEDSARLSWTAPDAAFDSFYIAYAEPRPDGEAIVLVVPGS |
| | ERSYDLTGLKPGTEYSVLIHGVKGGLLSSPLSAHFTT |
| 1666 | MLPAPKNLVVSRVTEDSARLSWTAPDAAFDSFDIDYVEFGWTGEAIALLVPGS |
| | ERSYDLTGLKPGTEYWVWIGGVKGGDYSPPLNAYFTT |
| 1667 | MLPAPKNLVVSRVTEDSARLSWTAPDAAFDSFFIGYLEPQPPGEAINLLVPGS |
| | ERSYDLTGLKPGTEYNVTIQGVKGGFPSLPLLAEFTT |
| 1668 | MLPAPKNLVVSRVTEDSARLSWTAPDAAFDSFFIGYLEPQPPGEAISLFVPGS |
| | ERSYDLTGLKPGTEYNVTIQGVKGGFPSDPLVASFTT |
| 1669 | MLPAPKNLVVSRVTEDSARLSWTAPDAAFDSFYIAYAEPRPDGEAIQLSVPGS |
| | ERSYDLTGLKPGTEYSVLIHGVKGGLLSSPLHASFTT |
| 1670 | MLPAPKNLVVSRVTEDSARLSWTAPDAAFDSFFIGYLEPQPPGEAIDLTVPGS |
| | ERSYDLTGLKPGTEYNVTIQGVKGGFPSMPLSAIFTT |
| 1671 | MLPAPKNLVVSRVTEDSARLSWTAPDAAFDSFFIGYLEPQPPGEAIALLVPGS |
| | ERSYDLTGLKPGTEYNVTIQGVKGGFPSNPLEAKFTT |
| 1672 | MLPAPKNLVVSRVTEDSARLSWTAPDAAFDSFFIGYLEPQPPGEAIQLWVPGS |
| | ERSYDLTGLKPGTEYNVTIQGVKGGFPSTPLQALFTT |
| 1673 | MLPAPKNLVVSRVTEDSARLSWTAPDAAFDSFFIGYLEPQPPGEAIDLWVPGS |
| | ERSYDLTGLKPGTEYNVTIQGVKGGFPSTPLIATVTT |
| 1674 | MLPAPKNLVVSRVTEDSARLSWTAPDAAFDSFYIEYWEGYRSGEAIVLTVPGS |
| | ERSYDLTGLKPGTEYRVHIWGVKGGAVSYPLSAIFTT |
| 1675 | MLPAPKNLVVSRVTEDSARLSWTAPDAAFDSFFIGYLEPQPPGEAIGLFVPGS |
| | ERSYDLTGLKPGTEYNVTIQGVKGGFPSMPLSAIFTT |
| 1676 | MLPAPKNLVVSRVTEDSARLSWTAPDAAFDSFEIAYQELSLWGEAIVLTVPGS |
| | ERSYDLTGLKPGTEYYVHIGGVKGGIWSRPLSAIFTT |
| 1677 | MLPAPKNLVVSRVTEDSARLSWTAPDAAFDSFFIGYLEPQPPGEAIELYVPGS |
| | ERSYDLTGLKPGTEYNVTIQGVKGGFPSDPLEADFTT |
| 1678 | MLPAPKNLVVSRVTEDSARLSWTAPDAAFDSFFIGYLEPQPPGEAIDLWVPGS |
| | ERSYDLTGLKPGTEYNVTIQGVKGGFPSLPLDAVETT |
| 1679 | MLPAPKNLVVSRVTEDSARLSWTAPDAAFDSFEIDYAENRHHGEAIALLVPGS |
| | ERSYDLTGLKPGTEYIVFIGGVKGGRWSQPLVASFTT |
| 1680 | MLPAPKNLVVSRVTEDSARLSWTAPDAAFDSFFIGYLEPQPPGEAIDLYVPGS |
| | ERSYDLTGLKPGTEYNVTIQGVKGGFPSHPLQAHFTT |
| 1681 | MLPAPKNLVVSRVTEDSARLSWTAPDAAFDSFYIAYAEPRPDGEAITLLVPGS |
| | ERSYDLTGLKPGTEYSVLIHGVKGGLLSSPLSAIFTT |
| 1682 | MLPAPKNLVVSRVTEDSARLSWTAPDAAFDSFFIGYLEPQPPGEAIHLVVPGS |
| | ERSYDLTGLKPGTEYNVTIQGVKGGFPSDPLYAWFTT |
| 1683 | MLPAPKNLVVSRVTEDSARLSWTAPDAAFDSFEIAYFEYCLNGEAIVLTVPGS |
| | ERSYDLTGLKPGTEYWVQIGGVKGGTWSWPLSAIFTT |
| 1684 | MLPAPKNLVVSRVTEDSARLSWTAPDAAFDSFFIGYLEPQPPGEAIHLLVPGS |
| | ERSYDLTGLKPGTEYNVTIQGVKGGFPSMPLSAIVTT |
| 1685 | MLPAPKNLVVSRVTEDSARLSWTAPDAAFDSFEIGYFERAWFGEAIVLTVPGS |
| | ERSYDLTGLKPGTEYAVFIGGVKGGSYSYPLSAIFTT |
| 1686 | MLPAPKNLIVSRVTEDSARLSWTAPDAAFDSFFIGYLEPQPPGEAISLYVPGS |
| | ERSYDLTGLKPGTEYNVTIQGVKGGFPSDPLQAIFTT |
| 1687 | MLPAPKNLVVSRVTEDSARLSWTAPDAAFDSFFIGYLEPQPPGEAIHLGVPGS |
| | ERSYDLTGLKPGTEYNVTIQGVKGGFPSLPLVATFTT |
| 1688 | MLPAPKNLVVSRVTEDSARLSWTAPDAAFDSFFIGYLEPQPPGEAIGLFVPGS |
| | ERSYDLTGLKPGTEYNVTIQGVKGGFPSLPLQAHFTT |
| 1689 | MLPAPKNLVVSRVTEDSARLSWTAPDAAFDSFFIGYLEPQPPGEAIYLLVPGS |
| | ERSYDLTGLKPGTEYNVTIQGVKGGFPSTPLEASFTT |
| 1690 | MLPAPKNLVVSRVTEDSARLSWTAPDTAFDSFFIGYLEPQPPGEAIGLFVPGS |
| | ERSYDLTGLKPGTEYNVTIQGVKGGFPSDPLSAFFTT |
| 1691 | MLPAPKNLVVSRVTEDSARLSWTAPDAAFDSFFIGYLEPQPPGEAIYLTVPGS |
| | ERSYDLTGLKPGTEYNVTIQGVKGGFPSMPLSAIFTT |
| 1692 | MLPAPKNLVVSRVTEDSARLSWTAPDAAFDSFIILYGEAQYDGEAIVLTVPGS |
| | ERSYDLTGLKPGTEYPVDIYGVKGGPYSWPLSAIFTT |
| 1693 | MLPAPKNLVVSRVTEDSARLSWTAPDAAFDSFFIGYLEPQPPGEAIYLTVPGS |
| | ERSYDLTGLKPGTEYNVTIQGVKGGFPSKPLTANFTT |
| 1694 | MLPAPKNLVVSRVTEDSARLSWTAPDAAFDSFFIGYLEPQPPGEAITLYVPGS |
| | ERSYDLTGLKPGTEYNVTIQGVKGGFPSTPLTATFTT |
| 1695 | MLPAPKNLVVSRVTEDSARLSWTAPDAAFDSFFIGYLEPQPPGEAIHLFVPGS |
| | ERSYDLTGLKPGTEYNVTIQGVKGGFPSGPLHATFTT |
| 1696 | MLPAPKNLVVSRVTEDSARLSWTAPDAAFDSFFIGYLEPQPPGEAIALWVPGS |
| | ERSYDLTGLKPGTEYNITIQGVKGGFPSMPLVANFTT |
| 1697 | MLPAPKNLVVSRVTEDSARLSWTAPDAAFDSFGIYYWEYTGGEAIVLTVPGSE |
| | RSYDLTGLKPGTEYVVRILGVKGGAYSTPLSAIFTT |
| 1698 | MLPAPKNLVVSRVTEDSARLSWTAPDAAFDSFYIAYAEPRPDGEAIVLDVPGS |
| | ERSYDLTGLKPGTEYSVLIHGVKGGLLSSPLVADETT |
| 1699 | MLPAPKNLVVSRVTEDSARLSWTAPDAAFDSFFIGYLEPQPPGEAIHLLVPGS |
| | ERSYDLTGLKPGTEYNVTIQGVKGGFPSEPLLAIVTT |
| 1700 | MLPAPKNLVVSRVTEDSARLSWTAPDAAFDSFFIGYLEPQPPGEAIHLWVPGS |
| | ERSYDLTGLKPGTEYNVTIQGVKGGFPSLPLSAFFTT |
| 1701 | MLPAPKNLVVSRVTEDSARLSWTAPDAAFDSFFIDYDESLDSGEAIVLTVPGS |
| | ERSYDLTGLKPGTEYNVTIQGVKGGFPSSPLEAAFTT |
| 1702 | MLPAPKNLVVSRVTEDSARLSWTAPDAAFDSFEIAYFETCRTGEAIVLTVPGS |
| | ERSYDLTGLKPGTEYRVWIGGVKGGVWSRPLSAIFTT |
| 1703 | MLPAPKNLVVSRVTEDSARLSWTAPDAAFDSFFIGYLEPQPPGEAIGLWVPGS |
| | ERSYDLTGLKPGTEYNVTIQGVKGGFPSMPLSAIFTT |
| 1704 | MLPAPKNLVVSRVTEDSARLSWTAPDAAFDSFFIGYLEPQPPGEAIHLFVPGS |
| | ERSYDLTGLKPGTEYNVTIQGVKGGFPSNPLSAQFTT |
| 1705 | MLPAPKNLVVSRVTEDSARLSWTAPDAAFDSFFIGYLEPQPPGEAIALWVPGS |
| | ERSYDLTGLKPGTEYNVTIQGVKGGFPSQPLHAHFTT |
| 1706 | MLPAPKNLVVSRVTEDSARLSWTAPDAAFDSFFIGYLEPQPPGEAISLFVPGS |
| | ERSYDLTGLKPGTEYNVTIQGVKGGFPSVPLSATFTT |
| 1707 | MLPAPKNLVVSRVTEDSARLSWTAPDAAFDSFFIGYLEPQPPGEAIGLLVPGS |
| | ERSYDLTGLKPGTEYNVTIQGVKGGFPSHPLLAVETT |
| 1708 | MLPAPKNLVVSRVTEDSARLSWTAPDAAFDSFFIGYLEPQPPGEAIYLRVPGS |
| | ERSYDLTGLKPGTEYNVTIQGVKGGFPSAPLHAHFTT |
| 1709 | MLPAPKNLVVSRVTEDSARLSWTAPDAAFDSFFIGYLEPQPPGEAIHLYVPGS |
| | ERSYDLTGLKPGTEYNVTIQGVKGGFPSHPLIANFTT |
| 1710 | MLPAPKNLVVSRVTEDSARLSWTAPDAAFDSFFIGYLEPQPPGEAIHLQVPGS |
| | ERSYDLTGLKPGTEYNVTIQGVKGGFPSMPLSAIFTT |
| 1711 | MLPAPKNLVVSRVTEDSARLSWTAPDAAFDSFFIGYLEPQPPGEAIALYVPGS |
| | ERSYDLTGLKPGTEYNVTIQGVKGGFPSLPLVATFTT |
| 1712 | MLPAPKNLVVSRVTEDSARLSWTAPDAAFDSFFIGYLEPQPPGEAIQLFVPGS |
| | ERSYDLTGLKPGTEYNVTIQGVKGGFPSDPLVASFTT |
| 1713 | MLPAPKNLVVSRVTEDSARLSWTAPDAAFDSFEIAYFENSYYGEAIVLTVPGS |
| | ERSYDLTGLKPGTEYAVYIGGVKGGSWSNPLSAISTT |
| 1714 | MLPAPKNLVVSRVTEDSARLSWTAPDAAFDSFFIGYLEPQPPGEAIALLVPGS |
| | ERSYDLTGLKPGTEYNVTIQGVKGGFPSSPLNAYFTT |
| 1715 | MLPAPKNLVVSRVTEDSARLSWTAPDAAFDSFFIGYLEPQPPGEAIHLQVPGS |
| | ERSYDLTGLKPGTEYNVTIHGVKGGIPSMPLSAKFTT |
| 1716 | MLPAPKNLVVSRVTEDSARLSWTAPDAAFDSFFIGYLEPQPPGEAIDLWVPGS |
| | ERSYDLTGLKPGTEYNVTIQGVKGGFPSMPLEAVFTT |
| 1717 | MLPAPKNLVVSRVTEDSARLSWTAPDAAFDSFFIGYLEPQPPGEAISLLVPGS |
| | ERSYDLTGLKPGTEYNVTIQGVKGGFPSHPLDASFTT |
| 1718 | MLPAPKNLVVSRVTEDSARLSWTAPDAAFDSFFIGYLEPQPPGEAIALYVPGS |
| | ERSYDLTGLKPGTEYNVTIQGVKGGFPSEPLVATFTT |
| 1719 | MLPAPKNLVVSRVTEDSARLSWTAPDAAFDSFFIGYLEPQPPGEAIHLIVPGS |
| | ERSYDLTGLKPGTEYNVTIQGVKGGFPSDPLDASFTT |
| 1720 | MLPAPKNLVVSRVTEDSARLSWTAPDAAFDSFFIGYLEPQPPGEAIGLLVPGS |
| | ERSYDLTGLKPGTEYNVTIQGVKGGFPSNPLSAIFTT |
| 1721 | MLPAPKNLVVSRVTEDSARLSWTAPDAAFDSFFIGYLEPQPPGEAIFLLVPGS |
| | ERSYDLTGLKPGTEYNVTIQGVKGGFPSMPLSAIFTT |
| 1722 | MLPAPKNLVVSRVTEDSARLSWTAPDAAFDSFFIGYLEPQPPGEAIHLRVPGS |
| | ERSYDLTGLKPGTEYNVTIQGVKGGFPSDPLIAVETT |
| 1723 | MLPAPKNLVVSRVTEDSARLSWTAPDAAFDSFFIGYLEPQPPGEAISLYVPGS |
| | ERSYDLTGLKPGTEYNVTIQGVKGGFPSNPLIAQFTT |
| 1724 | MLPAPKNLVVSRVTEDSARLSWTAPDAAFDSFEIGYFERSFYGEAIILFVPGS |
| | ERSYDLTGLKPGTEYAVWIGGVKGGVWSRPLSAIFTT |
| 1725 | MLPAPKNLVVSRVTEDSARLSWTAPDAAFDSFFIGYLEPQPPGEAIDLWVPGS |
| | ERSYDLTGLKPGTEYNVTIQGVKGGFPSYPLSASFTT |
| 1726 | MLPAPKNLVVSRVTEDSARLSWTAPDAAFDSFFIGYLEPQPPGEAIVLFVPGS |
| | ERSYDLTGLKPGTEYNVTIQGVKGGFPSNPLSAISTT |
| 1727 | MLPAPKNLVVSRVTEDSARLSWTAPDAAFDSFFIGYLEPQPPGEAIALYVPGS |
| | ERSYDLTGLKPGTEYNVTIQGVKGGFPSGPLEAYFTT |
| 1728 | MLPAPKNLVVSRVTEDSARLSWTAPDAAFDSFFIGYLEPQPPGEAIALYVPGS |
| | ERSYDLTGLKPGTEYNVTIQGVKGGFPSLPLEANFTT |
| 1729 | MLPAPKNLVVSRVTEDSARLSWTAPDAAFDSFFIGYLEPQPPGEAIGLQVPGS |
| | ERSYDLTGLKPGTEYNVTIQGVKGGFPSDPLQAIFTT |
| 1730 | MLPAPKNLVVSRVTEDSARLSWTAPDAAFDSFFIGYLEPQPPGEAIALWVPGS |
| | ERSYDLTGLKPGTEYNVTIQGVKGGFPSHPLAAVETT |
| 1731 | MLPAPKNLVVSRVTEDSARLSWTAPDAAFDSFFIGYLEPQPPGEAIHLLVPGS |
| | ERSYDLTGLKPGTEYNVTIQGVKGGFPSEPLWAKFTT |
| 1732 | MLPAPKNLVVSRVTEDSARLSWTAPDAAFDSFFIGYLEPQPPGEAISLWVPGS |
| | ERSYDLTGLKPGTEYNVTIQGVKGGFPSTPLSAKFTT |
| 1733 | MLPAPKNLVVSRVTEDSARLSWTAPDAAFDSFFIGYLEPQPPGEAIDLWVPGS |
| | ERSYDLTGLKPGTEYNVTIQGVKGGFPSYPLLAIFTT |
| 1734 | MLPAPKNLVVSRVTEDSARLSWTAPDAAFDSFFIGYLEPQPPGEAIHLFVPGS |
| | ERSYDLTGLKPGTEYNVTIQGVKGGFPSVPLNAYFTT |
| 1735 | MLPAPKNLVVSRVTEDSARLSWTAPDAAFDSFEIVYAEWTQHGEAIVLTVPGS |
| | ERSYDLTGLKPGTEYYVHIGGVKGGKWSPPLYAIFTT |
| 1736 | MLPAPKNLVVSRVTEDSARLSWTAPDAAFDSFFIGYLEPQPPGEAILLWVPGS |
| | ERSYDLTGLKPGTEYNVTIQGVKGGFPSDPLIANFTT |
| 1737 | MLPAPKNLVVSRVTEDSARLSWTAPDAAFDSFEIWYAEWRQVGEAIVLTVPGS |
| | ERSYDLTGLKPGTEYNVDIHGVKGGKVSWPLSAISTT |
| 1738 | MLPAPKNLVVSRVTEDSARLSWTAPDAAFDSFFIGYLEPQPPGEAIELYVPGS |
| | ERSYDLTGLKPGTEYNVTIQGVKGGFPSDPLHAAFTT |
| 1739 | MLPAPKNLVVSRVTEDSARLSWTAPDAAFDSFEIDYVEFIFTGEAIGLIVPGS |
| | ERSYDLTGLKPGTKYWVTIAGVKGGEWSTPLQAFFTT |
| 1740 | MLPAPKNLVVSRVTEDSARLSWTAPDAAFDSFFIGYLEPQPPGEAIHLFVPGS |
| | ERSYDLTGLKPGTEYNVTIQGVKGGFPSDPLVASFTT |
| 1741 | MLPAPKNLVVSRVTEDSARLSWTAPDAAFDSFFIGYLEPQPPGEAIQLFVPGS |
| | ERSYDLTGLKPGTEYNVTIQGVKGGFPSLPLIAYFTT |
| 1742 | MLPAPKNLVVSRVTEDSARLSWTAPDAAFDSFFIGYLEPQPPGEAIYLYVPGS |
| | ERSYDLTGLKPGTEYNVTIQGVKGGFPSYPLTAQFTT |
| 1743 | MLPAPKNLVVSRVTEDSARLSWTAPDAAFDSFFIGYLEPQPPGEAIDLYVPGS |
| | ERSYDLTGLKPGTEYNVTIQGVKGGFPSMPLYARFTT |
| 1744 | MLPAPKNLVVSRVTEDSARLSWTAPDAAFDSFYIAYQELSLWGEAIVLTVPGS |
| | ERSYDLTGLKPGTEYNVTIQGVKGGFPSLPLAAQFTT |
| 1745 | MLPAPKNLVVSRVTEDSARLSWTAPDAAFDSFFIGYLEPQPPGEAISLFVPGS |
| | ERSYDLTGLKPGTEYNVTIQGVKGGFPSEPLAAKFTT |
| 1746 | MLPAPKNLVVSRVTEDSARLSWTAPDAAFDSFFIGYLEPQPPGEAIGLLVPGS |
| | ERSYDLTGLKPGTEYNVTIQGVKGGFPSIPLVADFTT |
| 1747 | MLPAPKNLVVSRVTEDSARLSWTAPDAAFDSFFIGYLEPQPPGEAIHLQVPGS |
| | ERSYDLTGLKPGTEYNVTIQGVKGGFPSIPLVAQFTT |
| 1748 | MLPAPKNLVVSRVTEDSARLSWTAQDAAFDSFFIGYLEPQPPGEAIALLVPGS |
| | ERSYDLTGLKPGTEYNVTIQGVKGGFPSHPLSASFTT |
| 1749 | MLPAPKNLVVSRVTEDSARLSWTAPDAAFDSFFIGYLEPQPPGEAINLTVPGS |
| | ERSYDLTGLKPGTEYNVTIQGVKGGFPSYPLQASFTT |
| 1750 | MLPAPKNLVVSRVTEDSARLSWTAPDAAFDSFTISYPEEAKHGEAIVLTVPGS |
| | ERSYDLTGLKPGTEYGVPINGVKGGVSSLPLSAIFTT |
| 1751 | MLPAPKNLVVSRVTEDSARLSWTAPDAAFDSFFIGYLEPQPPGEAIALYVPGS |
| | ERSYDLTGLKPGTEYNVTIQGVKGGFPSHPLQAHFTT |
| 1752 | MLPAPKNLVVSRVTEDSARLSWTAPDAAFDSFFIGYLEPQPPGEAIVLLVPGS |
| | ERSYDLTGLKPGTEYNVTIQGVKGGFPSAPLVATFTT |
| 1753 | MLPAPKNLVVSRVTEDSARLSWTAPDAAFDSFLDLLPSNWDIAGEAIVLTVPG |
| | SERSYDLTGLKPGTEYHVNILGVKGGKESLPLVANFTT |
| 1754 | MLPAPKNLVVSRVTEDSARLSWTAPDAAFDSFFIRYLEPQPPGEAIHLSVPGS |
| | ERSYDLTGLKPGTEYNVTIQGVKGGFPSMPLYAIFTT |
| 1755 | MLPAPKNLVVSRVTEDSARLSWTAPDAAFDSFFIGYLEPQPPGEAISLYVPGS |
| | ERSYDQTGLKPGTEYNVTIQGVKGGFPSDPLSARFTT |
| 1756 | MLPAPKNLVVSRVTEDSARLSWTAPDAAFDSFFIGYLEPQPPGEAIGLFVPGS |
| | ERSYDLTGLKPGTEYNVTIQGVKGGFPSMPLSPIFTT |
| 1757 | MLPAPKNLVVSRVTEDSARLSWTAPDAAFDSFFIGYLEPQPPGEAIHLQVPGS |
| | ERSYDLTGLKPGTEYNVTIQGVKGGFPSVPLHARFTT |
| 1758 | MLPAPKNLVVSRVTEDSARLSWTAPDAAFDSFLILYIEQDHRGEAIVLTVPGS |
| | ERSYDLTGLKPGTEYWVHITGVKGGYYSAPLSAIFTT |
| 1759 | MLPAPKNLVVSRVTEDSARLSWTAPDAAFDSFFIGYLEPQPPGEAIQLFVPGS |
| | ERSYDLTGLKPGTEYNVTIQGVKGGFPSTPLVASFTT |
| 1760 | MLPAPKNLVVSRVTEDSARLSWTAPDAAFDSFFIGYLEPQPPGEAIDLYVPGS |
| | ERSYDLTGLKPGTEYNVTIQGVKGGFPSEPLWADFTT |
| 1761 | MLPAPKNLVVSRVTEDSARLSWTAPDAAFDSFYIAYAEPRPDGEAIWLLVPGS |
| | ERSYDLTGLKPGTEYSVLIHGVKGGLLSSPLSADFTT |
| 1762 | MLPAPKNLVVSRVTEDSARLSWTAPDAAFDSFFIGYLEPQPPGEAIQLLVPGS |
| | ERSYDLTGLKPGTEYNVTIQGVKGGFPSDPLVAYSTT |
| 1763 | MLPAPKNLVVSRVTEDSARLSWTAPDAAFDSFLIQYDEEGVWGEAIVLTVPGS |
| | ERSYDLTGLKPGTEYSVGIGGVKGGWSSVPLSAIFTT |
| 1764 | MLPAPKNLVVSRVTEDSARLSWTAPDAAFDSFFIGYLEPQPPGEAIHLYVPGS |
| | ERSYDLTGLKPGTEYNVTIQGVKGGFPSLPLVATFTT |
| 1765 | MLPAPKNLVVSRVTEDSARLSWTAPDAAFDSFFIGYLEPQPPGEAITLLVPGS |
| | ERSYDLTGLKPGTEYNVTIQGVKGGFPSMPLSAIFTT |
| 1766 | MLPAPKNLVVSRVTEDSARLSWTAPDAAFDSFTIWYYESPTGGEAIVLTVPGS |
| | ERSYDLTGLKPGTEYMVFIQGVKGGCFSTPLYAIFTT |
| 1767 | MLPAPKNLVVSRVTEDSARLSWTAPDAAFDSFFIGYLEPQPPGEAIELYVPGS |
| | ERSYDLTGLKPGTEYNVTIQGVKGGFPSLPLVATFTT |
| 1768 | MLPAPKNLVVSRVTEDSARLSWTAPDAAFDSFFIGYLEPQPPGEAIDLWVPGS |
| | ERSYDLTGLKPGTEYNVTIQGVKGGFPSLPLSASFTT |
| 1769 | MLPAPKNLVVSRVTEDSARLSWTAPDAAFDSFFIGYLEPQPPGEAIGLAVPGS |
| | ERSYDLTGLKPGTEYNVTIQGVKGGFPSEPLIADFTT |
| 1770 | MLPAPKNLVVSRVTEDSARLSWTAPDAAFDSFFIGYLEPQPPGEAITLYVPGS |
| | ERSYDLTGLKPGTEYNVTIQGVKGGFPSIPLSAEFTT |
| 1771 | MLPAPKNLVVSRVTEDSARLSWTAPDAAFDSFFIGYLEPQPPGEAIHLQVPGS |
| | ERSYDLTGLKPGTEYNVTIQGVKGGFPSIPLIAVETT |
| 1772 | MLPAPKNLVVSRVTEDSARLSWTAPDAAFDSFEIAYFETCRTGEAIVLTVPGS |
| | ERSYDLTGLKPGTEYGVSIYGVKGGAHSGPLSAIFTT |
| 1773 | MLPAPKNLVVSRVTEDSARLSWTAPDAAFDSFFIGYLEPQPPGEAIHLYVPGS |
| | ERSYDLTGLKPGTEYNVTIQGVKGGFPSVPLIAKFTT |
| 1774 | MLPAPKNLVVSRVTEDSARLSWTAPDAAFDSFFIGYLEPQPPGEAINLWVPGS |
| | ERSYDLTGLKPGTEYNVTIQGVKGGFPSTPLFAGFTT |
| 1775 | MLPAPKNLVVSRVTEDSARLSWTAPDAAFDSFEIDYAEDIREGEAIALVVPGS |
| | ERSYDLTGLKPGTEYWVSIGGVKGGTWSRPLFAPFTT |
| 1776 | MLPAPKNLVVSRVTEDSARLSWTAPDAAFDSFFIGYLEPQPPGEAITLYVPGS |
| | ERSYDMTGLKPGTEYNVTIQGVKGGFPSLPLQAHFTT |
| 1777 | MLPAPKNLIVSRVTEDSARLSWTAPDAAFDSFFIGYLEPQPPGEAIHLQVPGS |
| | ERSYDLTGLKPGTEYNVTIQGVKGGFPSNPLHAEFTT |
| 1778 | MLPAPKNLVVSRVTEDSARLSWTAPDAAFDSFFIGYLEPQPPGEAITLVVPGS |
| | ERSYDLTGLKPGTEYNVTIQGVKGGFPSDPLVASFTT |
| 1779 | MLPAPKNLVVSRVTEDSARLSWTAPDAAFDSFEIAYQELSLWGEAIVLTVPGS |
| | ERSYDLIGLKPGTEYYVHIGGVKGGIWSSPLSAISTT |
| 1780 | MLPAPKNLVVSRVTEDSARLSWTAPDAAFDSFFIGYLEPQPPGEAIHLWVPGS |
| | ERSYDLTGLKPGTEYNVTIQGVKGGFPSLPLLAKFTT |
| 1781 | MLPAPENLVVSRVTEDSARLSWTALDAAFDSFFIGYLEPQPPGEAISLLVPGS |
| | ERSYDLTGLKPGTEYNVTIQGVKGGIASEPLSAAFTT |
| 1782 | MLPAPKNLVVSRVTEDSARLSWTAPDAAFDSFFIGYLEPQPPGEAIGLRVPGS |
| | ERSYDLTGLKPGTEYNVTIQGVKGGFPSEPLIADFTT |
| 1783 | MLPAPKNLVVSRVTEDSARLSWTAPDAAFDSFIIQYGEYLRWGEAIVLTVPGS |
| | ERSYDLTGLKPGTEYQVEIYGVKGGPLSKPLSAIFTT |
| 1784 | MLAPKNLVVSRVTEDSARLSWTAPDAAFDSFFIGYLEPQPPGEAISLLVPGSE |
| | RSYDLTGLKPGTEYNVTIQGVKGGFPSSPLLAGFTT |
| 1785 | MLPAPKNLVVSRVTEDSARLSWTAPDAAFDSFFIGYLEPQPPGEAISLQVPGS |
| | ERSYDLTGLKPGTEYNVTIQGVKGGFPSAPLVANFTT |
| 1786 | MLPAPKNLVVSRVTEDSARLSWTAPDAAFDSFFIGYLEPQPSGEAIHLIVPGS |
| | ERSYDLTGLKPGTEYNVTIQGVKGGFPSDPLVASFTT |
| 1787 | MLPAPKNLVVSRVTEDSARLSWTAPDAAFDSFFIGYLEPQPPGEAIVLWVPGS |
| | ERSYDLTGLKPGTEYNVTIQGVKGGFPSHPLVAKFTT |
| 1788 | MLPAPKNLVVSRVTEDSARLSWTAPDAAFDSFFIGYLEPQPPGEAILLAVPGS |
| | ERSYDLTGLKPGTEYNVTIQGVKGGFPSLPLVAHFTT |
| 1789 | MLPAPKNLVVSRVTEDSARLSWTTPDAAFDSFFIGYLEPQPPGEAISLYVPGS |
| | ERSYDLTGLKPGTEYNVTIQGVKGGFPSMPLSAIFTT |
| 1790 | MLPAPKNLVVSRVTEDSARLSWTAPDAAFDSFFINYREDKWIGEAIVLTVPGS |
| | ERSYDLTGLKPGTEYSVPIDGVKGGAASPPLSAIFTT |
| 1791 | MLPAPKNLVVSRVTEDSARLSWTAPDAAFDSFFIGYLEPQPPGEAIILWVPGS |
| | ERSYDLTGLKPGTEYNVTIQGVKGGFPSVPLIAQFTT |
| 1792 | MLPAPKNLVVSRVTEDSARLSWTAPDAAFDSFFIGYLEPQPPGEAITLLVPGS |
| | ERSYDLTGLKPGTEYNVTIQGVKGGFPSKPLYAYFTT |
| 1793 | MLPAPKNLVVSRVTEDSARLSWTAPDAAFDSFFIGYLEPQPPGEAIILWVPGS |
| | ERSYDLTGLKPGTEYNVTIQGVKGGFPSIPLIAVETT |
| 1794 | MLPAPKNLVVSRVTEDSARLSWTAPDAAFDSFFIGYLEPQPPGEAISLYVPGS |
| | ERSYDLTGLKPGTEYNVTIQGVKGGFPSSPLFADFTT |
| 1795 | MLPAPKNLVVSRVTEDSARLSWTAPDAAFDSFFIGYLEPQPPGEAIDLLVPGS |
| | ERSYDLTGLKPGTEYNVTIQGVKGGFPSMPLSAIFTT |
| 1796 | MLPAPKNLVVSRVTEDSARLSWTAPDAAFDSFFIGYLEPQPPGEAISLLVPGS |
| | ERSYDLTGLKPGTEYNVTIQGVKGGFPSVPLSAIFTT |
| 1797 | MLPAPKNLVVSRVTEDSARLSWTAPDAAFDSFFIGYLEPQPPGEAIGLHVPGS |
| | ERSYDLTGLKPGTEYNVTIQGVKGGFPSIPLEAKFTT |
| 1798 | MLPAPKNLVVSRVTEDSARLSWTAPDAAFDSFEISYFETSWHGEAIVLIVLGS |
| | ERSYDLTGLKPGTEYRVYIGGVKGGSWSQPLSAIFTT |
| 1799 | MLPAPKNLVVSRVTEDSARLSWTAPDAAFDSFFIGYLEPQPPGEAIGLVVPGS |
| | ERSYDLTGLKPGTEYNVTIQGVKGGFPSHPLGAIFTT |
| 1800 | MLPAPKNLVVSRVTEDSARLSWTALDAAFDSFFIGYLEPQPPGEAIHLFVPGS |
| | ERSYDLTGLKPGTEYNVTIQGVKGGFPSEPLIANFTT |
| 1801 | MLPAPKNLVVSRVTEDSARLSWTAPDAAFDSFEIGYWENAYKGEAIVLTVPGS |
| | ERSYDLTGLKPGTEYVVFIGGVKGGVWSVPLSAISTT |
| 1802 | MLPAPKNLVVSRVTEDSARLSWTAPDAAFDSFFIGYLEPQPPGEAIHLLVPGS |
| | ERSYDLTGLKPGTEYNVTIQGVKGGFPSMPLSAIFTT |
| 1803 | MLPAPKNLVVSRVTEDSARLSWTAPDAAFDSFFIGYLEPQPPGEAITLSVPGS |
| | ERSYDLTGLKPGTEYNVTIQGVKGGFPSEPLIAIFTT |
| 1804 | MLPAPKNLVVSRVTEDSARLSWTAPDAAFDSFEIGYWENAYKGEAIVLTVPGS |
| | ERSYDLTGLKPGTEYEVFIGGVKGGVWSVPLSAIFTT |
| 1805 | MLPAPKNLVVSRVTEDSARLSWTAPDAAFDSFFIAYGESPESGEAIVLTVPGS |
| | ERSYDLTGLKPGTEYLVWIAGVKGGYYSDPLSAIFTT |
| 1806 | MLPAPKNLVVSRVTEDSARLSWTAPDAAFDSFFIGYLEPQPPGEAIDLFVPGS |
| | ERSYDLTGLKPGTEYNVTIQGVKGGFPSLPLVASFTT |
| 1807 | MLPAPKNLVVSRVTEDSARLSWTAPDAAFDSFFIGYLEPQPPGEAIDLWVPGS |
| | ERSYDLTGLKPGTEYNVTIQGVKGGFPSDPLDAHFTT |
| 1808 | MLPAPKNLVVSRVTEDSARLSWTAPDAAFDSFFIGYLEPQPPGEAISLYVPGS |
| | ERSYDLTGLKPGTEYNVTIQGVKGGFPSLPLAAQFTT |
| 1809 | MLPAPKNLVVSRVTEDSARLSWTAPDAAFDSFFIGYLEPQPPGEAIHLFVPGS |
| | ERSYDLTGLKPGTEYNVTIQGVKGGFPSEPLIANFTT |
| 1810 | MLPAPKNLVVSRVTEDSARLSWTAPDAAFDSFFIGYLEPQPPGEAIALWVPGS |
| | ERSYDLTGLKPGTEYNVTIQGVKGGFPSTPLIAQFTT |
| 1811 | MLPAPKNLVVSRVTEDSARLSWTAPDAAFDSFFIGYLEPQPPGEAISLWVPGS |
| | ERSYDLTGLKPGTEYNVTIQGVKGGFPSSPLVAYFTT |
| 1812 | MLPAPKNLVVSRVTEDSARLSWTAPDAAFDSFFIGYLEPQPPGEAIALVVPGS |
| | ERSYDLTGLKPGTEYNVTIQGVKGGFPSMPLFAYFTT |
| 1813 | MLPAPKNLVVSRVTEDSARLSWTAPDAAFDSFFIGYLEPQPPGEAISLWVPGS |
| | ERSYDLTGLKPGTEYNVTIQGVKGGFPSDPLGAHFTT |
| 1814 | MLPAPKNLVVSRVTEDSARLSWTAPDAAFDSFPIAYPEHLPPGEAIVLTVPGS |
| | ERSYDLTGLKPGTEYPVNIRGVKGGFVSFPLSAIFTT |
| 1815 | MLPAPKNLVVSRVTEDSARLSWTAPDAAFDSFFIGYLEPQPPGEAIVLWVPGS |
| | ERSYDLTGLKPGTEYNVTIQGVKGGFPSHPLVAKFTT |
| 1816 | MLPAPKNLVVSRVTEDSARLSWTAPDAAFDSFFIGYLEPQPPGEAIVLWVPGS |
| | ERSYDLTGLKPGTEYNVTIQGVKGGFPSHPLVAHFTT |
| 1817 | MLPAPKNLVVSRVTEDSARLSWTAPDAAFDSFFIGYLEPQPPGEAITLYVPGS |
| | ERSYDLNGLKPGTEYNVTIQGVKGGFPSMPLSAIFTT |
| 1818 | MLPAPKNLVVSRVTEDSARLSWTAPDAAFDSFFIGYLEPQPPGEAIDLLVPGS |
| | ERSYDLTGLKPGTEYNVTIQGVKGGFPSEPLTAEFTT |
| 1819 | MLPAPKNLVVSRVTEDSARLSWTAPDAAFDSFFIGYLEPQPPGEAIHLWVPGS |
| | ERSYDLTGLKPGTEYNVTIQGVKGGFPSMPLSAIFTT |
| 1820 | MLPAPKNLVVSRVTEDSARLSWTAPDAAFDSFFIGYLEPQPPGEAIALYVPGS |
| | ERSYDLTGLKPGTEYNVTIQGVKGGFPSEPLVATFTT |
| 1821 | MLPAPKNLVVSRVTEDSARLSWTAPDAAFDSFFIGYLEPQPPGEAISLIVPGS |
| | ERSYDLTGLKPGTEYNVTIQGVKGGFPSDPLIAIFTT |
| 1822 | MLPAPKNLVVSRVTEDSARLSWTAPDAAFDSFFIGYLEPQPPGEAIHLYVPGS |
| | ERSYDLTGLKPGTEYNVTIQGVKGGFPSEPLIANFTT |
| 1823 | MLPAPKNLVVSRVTEDSARLSWTAPDAAFDSFFIGYLEPQPPGEAITLLVPGS |
| | ERSYDLTGLKPGTEYNVTIQGVKGGFPSIPLIAIFTT |
| 1824 | MLPAPKNLVVSRVTEDSARLSWTAPDAAFDSFFIGYLEPQPPGEAIDLYVPGS |
| | ERSYDLTGLKPGTEYNVTIQGVKGGFPSLPLQAHFTT |
| 1825 | MLPAPKNLVVSRVTEDSARLSWTAPDAAFDSFFIGYLEPQPPGEAIDLLVPGS |
| | ERSYDLTGLKPGTEYNVTIQGVKGGFPSEPLFAHFTT |
| 1826 | MLPAPKNLVVSRVTEDSARLSWTAPDAAFDSFEIGYFEYSYYGEAIVLTVPGS |
| | ERSYDLIGLKPGTEYRVYIGGVKGGGWSRPLSAIFTT |
| 1827 | MLPAPKNLVVSRVTEDSARLSWTAPDAAFDSFDINYDELSGEGEAIALFVPGS |
| | ERSYDLTGLKPGTEYWVSIGGVKGGRFSEPLYARFTT |
| 1828 | MLPAPKNLVVSRVTEDSARLSWTAPDAAFDSFFIGYLEPQPPGEAINLFVPGS |
| | ERSYDLTGLKPGTEYNVTIQGVKGGFPSMPLSAIFTT |
| 1829 | MLPAPKNLVVSRVTEDSARLSWTAPDAAFDSFFIGYLEPQPPGEAIHLLVPGS |
| | ERSYDLTGLKPGTEYNVTIQGVKGGFPSGPLQASFTT |
| 1830 | MLPAPKNLVVSRVTEDSARLSWTAPDAAFDSFFIGYLEPQPPGEAIHLQVPGS |
| | ERSYDLTGLKPGTEYNVTIQGVKGGFPSDPLVAKFTT |
| 1831 | MLPAPKNLVVSRVTEDSARLSWTAPDAAFDSFDIGYTETVSFGEAIVLTVPGS |
| | ERSYDLTGLKPGTEYIVKILGVKGGFASFPLSAIFTT |
| 1832 | MLPAPKNLVVSRVTEDSARLSWTAPDAAFDSFEIGYFENLYLGEAIVLTVPGS |
| | ERSYDLTGLKPGTEYWVQIGGVKGGNWSAPLSAIFTT |
| 1833 | MLPAPKNLVVSRVTEDSARLSWTAPDAAFDSFFIGYLEPQPPGEAIDLYVPGS |
| | ERSYDLTGLKPGTEYNVTIQGVKGGFPSHPLVAVETT |
| 1834 | MLPAPKNLVVSRVTEDSARLSWTAPDAAFDSFFIGYLEPQPPGEAIHLFVPGS |
| | ERSYDLTGLKPGTEYNVTIQGVKGGFPSDPLHAAFTT |
| 1835 | MLPAPKNLVVSRVTEDSARLSWTAPDAAFDSFYIAYAEPRPDGEAIILVVPGS |
| | ERSYDLTGLKPGTEYSVLIHGVKGGLLSSPLDAGETT |
| 1836 | MLPAPKNLVVSRVTEDSARLSWTAPDAAFDSFFIGYLEPQPPGEAIDLWVPGS |
| | ERSYDLTGLKPGTEYNVTIQGVKGGFPSMPLDAYFTT |
| 1837 | MLPAPKNLVVSRVTEDSARLSWTAPDAAFDSFFIGYLEPQPPGEAIELFVPGS |
| | ERSYDLTGLKPGTEYNVTIQGVKGGFPSMPLSAIFTT |
| 1838 | MLPAPKNLVVSRVTEDSARLSWTAPDAAFDSFFIGYLEPQPPGEAISLYVPGS |
| | ERSYDLIGLKPGTEYNVTIQGVKGGFPSIPLVAVETT |
| 1839 | MLPAPKNLVVSRVTEDSARLSWTAPDAAFDSFFIGYLEPQPPGEAIALLVPGS |
| | ERSYDLTGLKPGTEYNVTIQGVKGGFPSHPLSASFTT |
| 1840 | MLPAPKNLVVSRVTEDSARLSWTAPDAAFDSFFIGYLEPQPPGEAISLVVPGS |
| | ERSYDLTGLKPGTEYNVTIQGVKGGFPSNPLIATFTT |
| 1841 | MLPAPKNLVVSRVTEDSARLSWTAPDAAFDSFEIAYIEVNIQGEAIVLTVPGS |
| | ERSYDLTGLKPGTEYYVHIGGVKGGPSSSPLSAIFTT |
| 1842 | MLPAPKNLVVSRVTEDSARLSWTAPDAAFDSFFIGYLEPQPPGEAIHLIVPGS |
| | ERSYDLIGLKPGTEYNVTIQGVKGGFPSDPLVASFTT |
| 1843 | MLPAPKNLVVSRVTEDSARLSWTAPDAAFDSFFIGYLEPQPPGEAIYLFVPGS |
| | ERSYDLTGLKPGTEYNVTIQGVKGGFPSMPLSAIFTT |
| 1844 | MLPAPKNLVVSRVTEDSARLSWTAPDAAFDSFFIGYLEPQPPGEAISLWVPGS |
| | ERSYDLTGLKPGTEYNVTIQGVKGGFPSMPLSAIFTT |
| 1845 | MLPAPKNLVVSRVTEDSARLSWTAPDAAFDSFFIGYLEPQPPGEAIHLFVPGS |
| | ERSYDLTGLKPGTEYNVTIQGVKGGFPSIPLYARFTT |
| 1846 | MLPAPKNLVVSRVTEDSARLSWTAPDAAFDSFEIAYFETCRTGEAIVLTVPGS |
| | ERSYDLTGLKPGTEYWVQIGGVKGGNWSAPLSAIFTT |
| 1847 | MLPAPKNLVVSRVTEDSARLSWTAPDAAFDSFFIGYLEPQPPGEAIHLFVPGS |
| | ERSYDLTGLKPGTEYNVTIQGVKGGFPSMPLSAIFTT |
| 1848 | MLPAPKNLVVSRVTEDSARLSWTAPDAAFDSFFIGYLEPQPPGEAIELYVPGS |
| | CRSYDLTGLKPGTEYNVTIQGVKGGFPSLPLVATFTT |
| 1849 | MLPAPKNLVVSRVTEDSARLSWTAPDAAFDSFFIGYLEPQPPGEAIHLYVPGS |
| | CRSYDLTGLKPGTEYNVTIQGVKGGFPSVPLIAKFTT |

[0301] Without being bound to any particular theory, in some embodiments, the FN3 domains that are linked to the nucleic acid molecule may be used in the targeted delivery of the therapeutic agent to cells that express the binding partner of the one or more FN3 domains, and lead intracellular accumulation of the nucleic acid molecule therein. This can allow the siRNA molecule to properly interact with the cell machinery to inhibit the expression of the target gene, improve efficacy, and also avoid, in some embodiments, toxicity that may arise with untargeted administration of the same siRNA molecule.

[0302] The FN3 domains described herein that bind to their specific target protein may be generated as monomers, dimers, or multimers, for example, as a means to increase the valency and thus the avidity of target molecule binding, or to generate bi- or multispecific scaffolds simultaneously binding two or more different target molecules. The dimers and multimers may be generated by linking monospecific, bi- or multispecific protein scaffolds, for example, by the inclusion of an amino acid linker, for example a linker containing poly-glycine, glycine and serine, or alanine and proline.

[0303] Thus, as provided herein, the different FN3 domains that are linked to the siRNA molecule can also be conjugated or linked to another FN3 domain that binds to a different target. The linker can be a flexible linker. The linker can be a short peptide sequence, such as those described herein. For example, the linker can be a G/S or G/A linker and the like. As provided herein, the linker can be, for example, a linker as shown in Table 10.

TABLE 10

| Exemplary Peptide Linker Sequences | |
|---|---|
| SEQ ID NO | SEQUENCE |
| 645 | (GS)₂ |
| 646 | (GGGS)₂ |
| 647 | (GGGGS)₁₋₅ |
| 648 | (GGGGS)₅ |
| 649 | (GGGGA)₁₋₅ |
| 650 | (AP)₁₋₂₀ |
| 651 | (AP)₂₋₂₀ |
| 652 | (AP)₂ |
| 653 | (AP)₅ |
| 654 | (AP)₁₀ |
| 655 | (AP)₂₀ |
| 656 | A(EAAAK)₅AAA |
| 657 | (EAAAK)₁₋₅ |
| 658 | EAAAKEAAAKEAAAKEAAAK |
| 659 | GGGGSGGGGSGGGGSGGGGS |
| 660 | APAPAPAPAP |
| 661 | EAAAK |

[0304] In some embodiments, the FN3 domain comprising two FN3 domains connected by a linker have the amino acid sequence of SEQ ID NO: 645. In some embodiments, the FN3 domain comprising two FN3 domains connected by a linker have the amino acid sequence of SEQ ID NO: 646. In some embodiments, the FN3 domain comprising two FN3 domains connected by a linker have the amino acid sequence of SEQ ID NO: 647, In some embodiments, the FN3 domain comprising two FN3 domains connected by a linker have the amino acid sequence of SEQ ID NO: 648, In some embodiments, the FN3 domain comprising two FN3 domains connected by a linker have the amino acid sequence of SEQ ID NO: 649. In some embodiments, the FN3 domain comprising two FN3 domains connected by a linker have the amino acid sequence of SEQ ID NO: 650. In some embodiments, the FN3 domain comprising two FN3 domains connected by a linker have the amino acid sequence of SEQ ID NO: 651. In some embodiments, the FN3 domain comprising two FN3 domains connected by a linker have the amino acid sequence of SEQ ID NO: 652. In some embodiments, the FN3 domain comprising two FN3 domains connected by a linker have the amino acid sequence of SEQ ID NO: 653. In some embodiments, the FN3 domain comprising two FN3 domains connected by a linker have the amino acid sequence of SEQ ID NO: 654. In some embodiments, the FN3 domain comprising two FN3 domains connected by a linker have the amino acid sequence of SEQ ID NO: 655. In some embodiments, the FN3 domain comprising two FN3 domains connected by a linker have the amino acid sequence of SEQ ID NO: 656. In some embodiments, the FN3 domain comprising two FN3 domains connected by a linker have the amino acid sequence of SEQ ID NO: 657. In some embodiments, the FN3 domain comprising two FN3 domains connected by a linker have the amino acid sequence of SEQ ID NO: 658. In some embodiments, the FN3 domain comprising two FN3 domains connected by a linker have the amino acid sequence of SEQ ID NO: 659. In some embodiments, the FN3 domain comprising two FN3 domains connected by a linker have the amino acid sequence of SEQ ID NO: 660. In some embodiments, the FN3 domain comprising two FN3 domains connected by a linker have the amino acid sequence of SEQ ID NO: 661. In some embodiments, the FN3 domain comprising two FN3 domains connected by a linker have the amino acid sequence of one of SEQ ID Nos: 645-661.

[0305] The dimers and multimers may be linked to each other in a N- to C-direction. The use of naturally occurring as well as synthetic peptide linkers to connect polypeptides into novel linked fusion polypeptides is well known in the literature (Hallewell et al., J Biol Chem 264, 5260-5268, 1989; Alfthan et al., Protein Eng. 8, 725-731, 1995; Robinson & Sauer, Biochemistry 35, 109-116, 1996; U.S. Pat. No. 5,856,456). The linkers described in this paragraph may be also be used to link the domains provided in the formula provided herein and above.

[0306] Half-Life Extending Moieties

[0307] The FN3 domains may also, in some embodiments, incorporate other subunits for example via covalent interaction. In some embodiments, the FN3 domains further comprise a half-life extending moiety. Exemplary half-life extending moieties are albumin, albumin variants, albumin-binding proteins and/or domains, an aliphatic chain or chains that thing to serum proteins, transferrin and fragments and analogues thereof, and Fc regions. Amino acid sequences of the human Fc regions are well known, and include IgG1, IgG2, IgG3, IgG4, IgM, IgA and IgE Fc regions. In some embodiments, the FN3 domain binds to albumin, albumin variants, albumin-binding proteins and/or domains, and fragments and analogues thereof, extending the half-life of the entire molecule.

[0308] In some embodiments, the albumin binding domain comprises the amino acid sequence of SEQ ID NOs: 5, 6, 7, 8, 9, 10, 11, 12, 13, 14, 15, 16, 17, 18, 19, 20, 21, 22, or 23. In some embodiments, the albumin binding domain (protein) is isolated. In some embodiments, the albumin binding domain comprises an amino acid sequence that is at least, or is, 85%, 86%, 87%, 88%, 89%, 90%, 91%, 92%, 93%, 94%, 95%, 96%, 97%, 98%, or 99% identical to the amino acid sequence of SEQ ID NO: 5, 6, 7, 8, 9, 10, 11, 12, 13, 14, 15, 16, 17, 18, 19, 20, 21, 22, or 23. In some embodiments, the albumin binding domain comprises an amino acid sequence that is at least, or is, 85%, 86%, 87%, 88%, 89%, 90%, 901%, 92%, 93%, 94%, 95%, 96%, 97%, 98%, or 99% identical to the amino acid sequence of SEQ ID NO: 5, 6, 7, 8, 9, 10, 11, 12, 13, 14, 15, 16, 17, 18, 19, 20, 21, 22, or 23 provided that the protein has a substitution that corresponds to position 10 of SEQ ID NO: 5, 6, 7, 8, 9, 10, 11, 12, 13, 14, 15, 16, 17, 18, 19, 20, 21, 22, or 23. In some embodiments, the substitution is A10V. In some embodiments, the substitution is A10G, A10L, A10I, A10T, or A10S. In some embodiments, the substitution at position 10 is any naturally occurring amino acid. In some embodiments, the isolated albumin binding domain comprises an amino acid sequence that has 1, 2, 3, 4, 5, 6, 7, 8, 9, 10, 11, 12, 13, or 14 substitutions when compared to the amino acid sequence of SEQ ID NOs: 5, 6, 7, 8, 9, 10, 11, 12, 13, 14, 15, 16, 17, 18, 19, 20, 21, 22, or 23. In some embodiments, the substitution is at a position that corresponds to position 10 of SEQ ID NOs: 5, 6, 7, 8, 9, 10, 11, 12, 13, 14, 15, 16, 17, 18, 19, 20, 21, 22, or 23. In some embodiments, FN3 domains provided comprises a cysteine residue in at least one residue position corresponding to residue positions 6, 11, 22, 25, 26, 52, 53, 61, 88 or positions 6, 8, 10, 11, 14, 15, 16, 20, 30, 34, 38, 40, 41, 45, 47, 48, 53, 54, 59, 60, 62, 64, 70, 88, 89, or90 of SEQ ID NO: 5, 6, 7, 8, 9, 10, 11, 12, 13, 14, 15, 16, 17, 18, 19, 20, 21, 22, or 23, or at a C-terminus. Although the positions are listed in a series, each position can also be chosen individually. In some embodiments, the cysteine is at a position that corresponds to position 6, 53, or 88. In some embodiments, additional examples of albumin binding domains can be found in U.S. Pat. No. 10,925,932, which hereby incorporated by reference.

[0309] All or a portion of an antibody constant region may be attached to the FN3 domain to impart antibody-like properties, especially those properties associated with the Fc region, such as Fc effector functions such as C1q binding, complement dependent cytotoxicity (CDC), Fc receptor binding, antibody-dependent cell-mediated cytotoxicity (ADCC), phagocytosis, downregulation of cell surface receptors (e.g., B cell receptor; BCR), and may be further modified by modifying residues in the Fc responsible for these activities (for review; see Strohl, Curr Opin Biotechnol. 20, 685-691, 2009).

[0310] Additional moieties may be incorporated into the FN3 domains such as polyethylene glycol (PEG) molecules, such as PEG5000 or PEG20,000, fatty acids and fatty acid esters of different chain lengths, for example laurate, myristate, stearate, arachidate, behenate, oleate, arachidonate, octanedioic acid, tetradecanedioic acid, octadecanedioic acid, docosanedioic acid, and the like, polylysine, octane, carbohydrates (dextran, cellulose, oligo- or polysaccharides) for desired properties. These moieties may be direct fusions with the protein scaffold coding sequences and may be generated by standard cloning and expression techniques. Alternatively, well known chemical coupling methods may be used to attach the moieties to recombinantly produced molecules disclosed herein.

[0311] A PEG moiety may for example be added to the FN3 domain t by incorporating a cysteine residue to the C-terminus of the molecule, or engineering cysteines into residue positions that face away from the binding face of the molecule, and attaching a PEG group to the cysteine using well known methods.

[0312] FN3 domains incorporating additional moieties may be compared for functionality by several well-known assays. For example, altered properties due to incorporation of Fc domains and/or Fc domain variants may be assayed in Fc receptor binding assays using soluble forms of the receptors, such as the FcγRI, FcγRII, FcγRIII or FcRn receptors, or using well known cell-based assays measuring for example ADCC or CDC, or evaluating pharmacokinetic properties of the molecules disclosed herein in in vivo models.

[0313] The compositions provided herein can be prepared by preparing the FN3 proteins and the nucleic acid molecules and linking them together. The techniques for linking the proteins to a nucleic acid molecule are known and any method can be used. For example, in some embodiments, the nucleic acid molecule is modified with a linker, such as the linker provided herein, and then the protein is mixed with the nucleic acid molecule comprising the linker to form the composition. For example, in some embodiments, an FN3 domain is conjugated to an siRNA via a cysteine using thiol-maleimide chemistry. In some embodiments, a cysteine-containing FN3 domain can be reduced in, for example, phosphate buffered saline (or any other appropriate buffer) with a reducing agent (e.g., tris(2-carboxyethyl) phosphine (TCEP)) to yield a free thiol. Then, in some embodiments, the free thiol containing FN3 domain is mixed with a maleimide linked-modified siRNA duplex and incubated under conditions to form the linked complex. In some embodiments, the mixture is incubated for 0-5 hr, or about 1, 2, 3, 4 or 5 hr at room temperature (RT). The reaction can be, for example, quenched with N-ethyl maleimide. In some embodiments, the conjugates can be purified using affinity chromatography and ion exchange. Other methods can also be used and this is simply one non-limiting embodiment.

[0314] Methods of making FN3 proteins are known and any method can be used to produce the proteins. Examples are provided in the references incorporated by reference herein.

[0315] In some embodiments, the FN3 domain specifically binding CD71 comprises the amino acid sequence of SEQ ID NOs: 365-644 or 663-672, wherein a histidine tag has been appended to the N-terminal or C-terminal end of the polypeptide for ease of purification. In some embodiments, the histidine tag (His-tag) comprises six histidine residues (SEQ ID NO: 662). In further embodiments, the His-tag to connected to the FN3 domain by at least one glycine residue or about 2 to about 4 glycine residues. Accordingly, after purification of the FN3 domain and cleavage of the His-tag from the polypeptide one or more glycine may be left on the N-terminus or C-terminus. In some embodiments, if the His-tag is removed from the N-terminus all of the glycines are removed. In some embodiments, if the His-tag is removed from the C-terminus one or more of the glycines are retained.

[0316] In some embodiments, the FN3 domain specifically binding CD71 comprises the amino acid sequence of SEQ ID NOs: 365-644 or 663-672, wherein the N-terminal methionine is retained after purification of the FN3 domain. In some embodiments, the FN3 domain specifically binding CD71 comprises the amino acid sequence of SEQ ID NOs: 365-644 or 663-672, wherein the N-terminal methionine is not retained after purification of the FN3 domain.

[0317] For example, as described herein, in some embodiments, the amino acid sequence of SEQ ID NO: 570 without the methionine would be as follows:

(SEQ ID NO: 2310)
LPAPKNLVVSRVTEDSARLSWTAPDAAFDSFYIAYAEPR
PDGEAILLQVPGSCRSYDLTGLKPGTEYSVLIHGVKGGL
LSSPLTAIFTT

[0318] As provided for herein, the FN3 domains can be linked to a siRNA molecule. Although certain FN3 domains are illustrated with the methionine, it should be understood that the FN3 domain can be linked to the siRNA without the N-terminal methionine. Additionally, one of skill in the art would appreciate that the numbering for the cysteine residue location, which is provided for herein would be shifted to one residue lower without the N-terminal methionine being present.

[0319] For example, the amino acid sequence of the FN3 domain can be such as those provided for herein, including but not limited to an amino acid sequence that is at least 90%, 915, 92%, 93%, 94%, 95%, 95%, 96%, 97%, 98%, 99%, or is identical to the amino acid sequence of SEQ ID NO: 570 or SEQ ID NO: 2310, can be linked to a siRNA pair as provided for herein. In some embodiments, siRNA pair comprises a sense strand and an antisense strand. In some embodiments, the sense strand comprises the nucleotide sequence of SEQ ID NO: 2110, or a modified version thereof, and the antisense strand comprises the nucleotide sequence of SEQ ID NO: 2220, or a modified version thereof. In some embodiments, the sense strand comprises the nucleotide sequence of SEQ ID NO: 2113, or a modified version thereof, and the antisense strand comprises the nucleotide sequence of SEQ ID NO: 2223, or a modified version thereof. In some embodiments, the sense strand comprises the nucleotide sequence of SEQ ID NO: 2111, or a modified version thereof, and the antisense strand comprises the nucleotide sequence of SEQ ID NO: 2221, or a modified version thereof. In some embodiments, the sense strand comprises the nucleotide sequence of SEQ ID NO: 1890 and the antisense strand comprises the nucleotide sequence of SEQ ID NO: 2290. In some embodiments, the sense strand comprises the nucleotide sequence of SEQ ID NO: 1893 and the antisense strand comprises the nucleotide sequence of SEQ ID NO: 2293. In some embodiments, the sense strand comprises the nucleotide sequence of SEQ ID NO: 1941 and the antisense strand comprises the nucleotide sequence of SEQ ID NO: 2051. In some embodiments, the sense strand comprises the nucleotide sequence of SEQ ID NO: 1942 and the antisense strand comprises the nucleotide sequence of SEQ ID NO: 2052. In some embodiments, the sense strand comprises the nucleotide sequence of SEQ ID NO: 1944 and the antisense strand comprises the nucleotide sequence of SEQ ID NO: 2054. In some embodiments, the sense strand and the antisense strand pair (siRNA pair) are as provided for herein.

[0320] Kits

[0321] In some embodiments, a kit comprising the compositions described herein are provided. The kit may be used for therapeutic uses and as a diagnostic kit. In some embodiments, the kit comprises the FN3 domain conjugated to the nucleic acid molecule.

[0322] Uses of the Conjugates

[0323] The compositions provided for herein may be used to diagnose, monitor, modulate, treat, alleviate, help prevent the incidence of, or reduce the symptoms of human disease or specific pathologies in cells, tissues, organs, fluid, or, generally, a host.

[0324] In some embodiments, the FN3 domain can facilitate delivery to activated lymphocytes, dendritic cells, or other immune cells for treatment of immunological diseases. Thus, in some embodiments, the FN3 domain that binds to CD71 is directed to immune cells. In some embodiments, the FN3 domain that binds to CD71 is directed to B cells. In some embodiments, the FN3 domain that binds to CD71 is directed to T cells. In some embodiments, the FN3 domain that binds to CD71 is directed to dendritic cells. In some embodiments, the FN3 domain that binds to CD71 is directed to monocytes. In some embodiments, the FN3 domain that binds to CD71 does not have an anti-proliferative effect on immune cells. For example, in some embodiments, the FN3 domain that binds to CD71 does not have an anti-proliferative effect on B cells, T cells, dendritic cells, monocytes, or any combination thereof.

[0325] In some embodiments, methods of treating an autoimmune disease in a subject in need thereof are provided. In some embodiments, the methods comprise administering to the subject a polypeptide or the pharmaceutical composition that binds to CD71. In some embodiments, that the polypeptide is a FN3 domain that binds to CD71. In some embodiments, the polypeptide comprises an amino acid sequence such as SEQ ID NOs: 361-644 or 663-672, or a polypeptide as provided herein that is linked to or conjugated to a therapeutic agent. In some embodiments, a method of treating an autoimmune disease in a subject, the method comprising administering to the subject an FN3 domain that binds CD71 and the FN3 domain is conjugated to a therapeutic agent (e.g., cytotoxic agent, an oligonucleotide, such as an siRNA, ASO, and the like, an FN3 domain that binds to another target, and the like).

[0326] In some embodiments, the autoimmune disease is selected from the group consisting of rheumatoid arthritis, Hashimoto's autoimmune thyroiditis, celiac disease, diabetes mellitus type 1, vitiligo, rheumatic fever, pernicious anemia/atrophic gastritis, alopecia areata, immune thrombocytopenic purpura, psoriasis, inflammatory bowel disease, systemic lupus erythematosus, pemphigus, Sjogren's syndrome, myositis, lupus nephritis, neuroinflammatory diseases such as multiple sclerosis, or prevention of solid organ transplant rejection.

[0327] In some embodiments, methods of reducing the expression of a target gene in a cell are provided. In some embodiments, the methods comprise delivering to the cell with a composition or a pharmaceutical composition as provided herein. In some embodiments, the cell is ex vivo. In some embodiments, the cell is in vivo. In some embodiments, the target gene is CD40. The target gene, however, can be any target gene as the evidence provided herein demonstrates that siRNA molecules can be delivered efficiently when conjugated to an FN3 domain. In some embodiments, the siRNA targeting CD40 is linked to an FN3 domain. In some embodiments, the FN3 polypeptide (domain) is one that binds to CD71. In some embodiments, the FN3 polypeptide is as provided for herein or as provided for in PCT Application No. PCT/US20/55509, U.S. application Ser. No. 17/070,337, PCT Application No. PCT/US20/55470, or U.S. application Ser. No. 17/070,020, each of which is hereby incorporated by reference in its entirety. In some embodiments, the siRNA is not conjugated to an FN3 domain. In some embodiments, a method of reducing the expression of a target gene results in a reduction of about 99%, 90-99%, 50-90%, or 10-50% in the expression of the target gene.

[0328] In some embodiments, a method of reducing the expression of CD40 is provided. In some embodiments, the reduced expression is the expression (amount) of CD40 mRNA. In some embodiments, a method of reducing the expression of CD40 results in a reduction of about 99%, 90-99%, 50-90%, or 10-50% in the expression of CD40. In some embodiments, the reduced expression is the expression (amount) of CD40 protein. In some embodiments, the reduced protein is CD40 protein. In some embodiments, reduction of CD40 protein occurs in immune cells. In some embodiments, reduction of CD40 protein occurs in B cells. In some embodiments, reduction of CD40 protein occurs in T cells. In some embodiments, reduction of CD40 protein occurs in dendritic cells. In some embodiments, the method comprises delivering to a cell an siRNA molecule as provided herein that targets CD40. In some embodiments, the siRNA is conjugated to an FN3 domain. In some embodiments, the FN3 domain is an FN3 domain that binds to CD71. In some embodiments, the FN3 domain is as provided for herein. In some embodiments, the FN3 domain is a dimer of two FN3 domains that bind to CD71. In some embodiments, the FN3 domains are the same. In some embodiments, the two FN3 domains are different, i.e., bind to different regions or amino acid residues of CD71, i.e. a different epitope. In some embodiments, the method comprises administering to a subject (patient) a CD40 targeting siRNA molecule, such as those provided herein. In some embodiments, the CD40 targeting siRNA molecule administered to the subject is conjugated or linked to an FN3 domain. In some embodiments, the FN3 domain is an FN3 domain that binds to CD71. In some embodiments, the FN3 domain is as provided for herein. In some embodiments, the FN3 domain is a dimer of two FN3 domains that bind to CD71. In some embodiments, the FN3 domains are the same. In some embodiments, the two FN3 domains are different, i.e., bind to different regions or amino acid residues of CD71, i.e. a different epitope. In some embodiments, the CD71 binding domain is a polypeptide as provided for herein.

[0329] In some embodiments, methods of delivering an siRNA molecule to a cell in a subject are provided. In some embodiments, the methods comprise administering to the subject a pharmaceutical composition comprising a composition as provided for herein. In some embodiments, the cell is a CD71 positive cell. The term “positive cell” in reference to a protein refers to a cell that expresses the protein. In some embodiments, the protein is expressed on the cell surface. In some embodiments, the cell is a tumor cell, a liver cell, an immune cell, a heart cell, a muscle cell, a cell of the CNS, or a cell inside the blood brain barrier. In some embodiments, the cell is an immune cell. In some embodiments, the cell is a B cell. In some embodiments, the cell is a T cell. In some embodiments, the cell is a dendritic cell. In some embodiments, the siRNA molecule downregulates expression of a target gene in the cell. In some embodiments, the target gene is CD40.

[0330] In some embodiments, methods of reducing one or more serum cytokines in a subject are provided. In some embodiments, the method comprises administering an siRNA molecule. In some embodiments, the siRNA molecule downregulates expression of a target gene in a cell. In some embodiments, the target gene is CD40. In some embodiments, the one or more cells is a CD71 positive cell. In some embodiments, the one or more cells is an immune cell. In some embodiments, the cell is a B cell. In some embodiments, the cell is a dendritic cell. In some embodiments, the cell is a T cell. In some embodiments, the one or more serum cytokines comprises IFN-γ, IL-6, TNF-α, IL-12, IP-10, and/or RANTES, or any combination thereof. In some embodiments, the one or more serum cytokines comprises IFN-γ. In some embodiments, the one or more serum cytokines comprises IL-6. In some embodiments, the one or more serum cytokines comprises TNF-α. In some embodiments, the one or more serum cytokines comprises IL-12. In some embodiments, the one or more serum cytokines comprises IP-10. In some embodiments, the one or more serum cytokines comprises RANTES.

[0331] In some embodiments, methods of reducing or inhibiting cell migration are provided. In some embodiments, the methods comprise contacting a cell with an siRNA molecule. In some embodiments, the siRNA molecule downregulates expression of a target gene in the cell. In some embodiments, the target gene is CD40. In some embodiments, the cell is a CD71 positive cell. In some embodiments, the cell is an immune cell. In some embodiments, the cell is a B cell. In some embodiments, the cell is a dendritic cell. In some embodiments, the methods comprise reducing or inhibiting cell migration from blood to tissue. In some embodiments, the methods comprise reducing or inhibiting cell migration from blood to lymphoid organ tissue. In some embodiments, the methods comprise selectively reducing or inhibiting migration of B cells and/or dendritic cells, and not reducing or inhibiting migration of T cells.

[0332] In some embodiments, methods of inhibiting margination are provided. In some embodiments, the methods comprise contacting a cell with an siRNA molecule. In some embodiments, the siRNA molecule downregulates expression of a target gene in the cell. In some embodiments, the target gene is CD40. In some embodiments, the cell is a CD71 positive cell. In some embodiments, the cell is an immune cell. In some embodiments, the cell is a B cell. In some embodiments, the cell is a dendritic cell. In some embodiments, the methods comprise reducing or inhibiting cell margination from the interior of a blood vessel towards to the blood vessel wall. In some embodiments, the methods comprise selectively reducing or inhibiting margination of B cells and/or dendritic cells, and not reducing or inhibiting margination of T cells.

[0333] In some embodiments, the compositions or pharmaceutical compositions provided herein may be administered alone or in combination with other therapeutics, that is, simultaneously or sequentially.

[0334] “Treat” or “treatment” refers to the therapeutic treatment and prophylactic measures, wherein the object is to prevent or slow down (lessen) an undesired physiological change or disorder, such as the development or spread of cancer. In some embodiments, beneficial or desired clinical results include, but are not limited to, alleviation of symptoms, diminishment of extent of disease, stabilized (i.e., not worsening) state of disease, delay or slowing of disease progression, amelioration or palliation of the disease state, and remission (whether partial or total), whether detectable or undetectable. “Treatment” can also mean prolonging survival as compared to expected survival if not receiving treatment. Those in need of treatment include those already with the condition or disorder as well as those prone to have the condition or disorder or those in which the condition or disorder is to be prevented.

[0335] A “therapeutically effective amount” refers to an amount effective, at dosages and for periods of time necessary, to achieve a desired therapeutic result. A therapeutically effective amount of the compositions provided herein may vary according to factors such as the disease state, age, sex, and weight of the individual. Exemplary indicators of an effective amount is improved well-being of the patient, decrease or shrinkage of the size of a tumor, arrested or slowed growth of a tumor, and/or absence of metastasis of cancer cells to other locations in the body.

[0336] Administration/Pharmaceutical Compositions

[0337] In some embodiments, pharmaceutical compositions comprising the compositions provided herein and a pharmaceutically acceptable carrier, are provided. For therapeutic use, the compositions may be prepared as pharmaceutical compositions containing an effective amount of the domain or molecule as an active ingredient in a pharmaceutically acceptable carrier. “Carrier” refers to a diluent, adjuvant, excipient, or vehicle with which the active compound is administered. Such vehicles can be liquids, such as water and oils, including those of petroleum, animal, vegetable or synthetic origin, such as peanut oil, soybean oil, mineral oil, sesame oil, and the like. For example, 0.4% saline and 0.3% glycine can be used. These solutions are sterile and generally free of particulate matter. They may be sterilized by conventional, well-known sterilization techniques (e.g., filtration). The compositions may contain pharmaceutically acceptable auxiliary substances as required to approximate physiological conditions such as pH adjusting and buffering agents, stabilizing, thickening, lubricating and coloring agents, etc. The concentration of the molecules disclosed herein in such pharmaceutical formulation can vary widely, i.e., from less than about 0.5%, usually at least about 1% to as much as 15 or 20% by weight and will be selected primarily based on required dose, fluid volumes, viscosities, etc., according to the particular mode of administration selected. Suitable vehicles and formulations, inclusive of other human proteins, e.g., human serum albumin, are described, for example, in Remington: The Science and Practice of Pharmacy, 21^{st} Edition, Troy, D. B. ed., Lipincott Williams and Wilkins, Philadelphia, P A 2006, Part 5, Pharmaceutical Manufacturing, pp. 691-1092 (see especially pp. 958-989).

[0338] The mode of administration for therapeutic use of the compositions disclosed herein may be any suitable route that delivers the agent to the host, such as parenteral administration, e.g., intradermal, intramuscular, intraperitoneal, intravenous or subcutaneous, pulmonary; transmucosal (oral, intranasal, intravaginal, rectal), using a formulation in a tablet, capsule, solution, powder, gel, particle; and contained in a syringe, an implanted device, osmotic pump, cartridge, micropump; or other means appreciated by the skilled artisan, as well known in the art. Site specific administration may be achieved by for example intrarticular, intrabronchial, intraabdominal, intracapsular, intracartilaginous, intracavitary, intracelial, intracerebellar, intracerebroventricular, intracolic, intracervical, intragastric, intrahepatic, intracardial, intraosteal, intrapelvic, intrapericardiac, intraperitoneal, intrapleural, intraprostatic, intrapulmonary, intrarectal, intrarenal, intraretinal, intraspinal, intrasynovial, intrathoracic, intrauterine, intravascular, intravesical, intralesional, vaginal, rectal, buccal, sublingual, intranasal, or transdermal delivery.

[0339] Pharmaceutical compositions can be supplied as a kit comprising a container that comprises the pharmaceutical composition as described herein. A pharmaceutical composition can be provided, for example, in the form of an injectable solution for single or multiple doses, or as a sterile powder that will be reconstituted before injection. Alternatively, such a kit can include a dry-powder disperser, liquid aerosol generator, or nebulizer for administration of a pharmaceutical composition. Such a kit can further comprise written information on indications and usage of the pharmaceutical composition.

### ENUMERATED EMBODIMENTS

[0340] Embodiments provided herein also include, but are not limited to, the following:

[0341] 1. A composition comprising an siRNA molecule comprising a sense strand and antisense strand that targets CD40 gene, such as those provided herein.

[0342] 2. The composition of embodiment 1, wherein the siRNA molecule does not contain any modified nucleobases.

[0343] 3. The composition of embodiment 1 or 2, wherein the siRNA molecule further comprises a linker covalently attached to the sense strand or the antisense strand.

[0344] 4. The composition of embodiment 3, wherein the linker is attached to a 5′ end or a 3′ end of the sense strand or the antisense strand.

[0345] 5. The composition of any one of embodiments 1-4, wherein the siRNA molecule further comprises a vinyl phosphonate modification on the sense strand or the antisense strand.

[0346] 6. The composition of embodiment 5, wherein the vinyl phosphonate modification is attached to a 5′ end or a 3′ end of the sense strand or the antisense strand.

[0347] 7. The composition of any one of embodiments 1-6, wherein the sense strand comprises a nucleic acid sequence selected from any of SEQ ID NOs: 46-178, 312-331, 352-356, 673-805, and 939-958.

[0348] 8. The composition of any one of embodiments 1-7, wherein the antisense strand comprises a nucleic acid sequence selected from any of SEQ ID NOs: 179-311, 332-351, 356-359, 806-938, and 959-978.

[0349] 9. The composition of any one of the preceding embodiments, wherein the siRNA molecule comprises the siRNA pair of A1, B1, C1, D1, E1, F1, G1, H1, I1, J1, K1, L1, M1, N1, O1, P1, Q1, R1, S1, T1, U1, V1, W1, X1, Y1, Z1, A2, B2, C2, D2, E2, F2, G2, H2, I2, J2, K2, L2, M2, N2, O2, P2, Q2, R2, S2, T2, U2, V2, W2, X2, Y2, Z2, A3, B3, C3, D3, E3, F3, G3, H3, I3, J3, K3, L3, M3, N3, O3, P3, Q3, R3, S3, T3, U3, V3, W3, X3, Y3, Z3, A4, B4, C4, D4, E4, F4, G4, H4, I4, J4, K4, L4, M4, N4, O4, P4, Q4, R4, S4, T4, U4, V4, W4, X4, Y4, Z4, A5, B5, C5, D5, E5, F5, G5, H5, I5, J5, K5, L5, M5, N5, O5, P5, Q5, R5, S5, T5, U5, V5, W5, X5, Y5, Z5, A6, B6, C6, D6, E6, F6, G6, H6, I6, J6, K6, L6, M6, N6, O6, P6, Q6, R6, S6, T6, U6, V6, W6, B7, C7, P8, Q8, R8, S8, T8, U8, V8, W8, X8, Y8, Z8, A9, B9, C9, D9, E9, F9, G9, H9, I9, J9, K9, L9, M9, N9, O9, P9, Q9, R9, S9, T9, U9, V9, W9, X9, Y9, Z9, A10, B10, F10, G10, H10, I10, J10, K10, L10, M10, N10, O10, P10, Q10, R10, S10, T10, U10, V10, W10, X10, Y10, Z10, A11, B11, C11, D11, E11, F11, G11, H11, I11, J11, K11, L11, M11, N11, O11, P11, Q11, R11, or as set forth in Table 3A, Table 3B, Table 4A, Table 4B, Table 5A, or Table 5B.

[0350] 10. The composition of any one of embodiments 1-6, wherein the sense strand consists essentially of 19 or 20 nucleotides.

[0351] 11. The composition of any one of embodiments 1-6, wherein the antisense strand consists essentially of 21 nucleotides.

[0352] 12. The composition of any one of the preceding embodiments, wherein the composition comprises an siRNA pair as provided for in Table 3A, Table 3B, Table 4A, Table 4B, Table 5A, or Table 5B, with a linker and/or vinyl phosphonate modification as provided for herein.

[0353] 13. The composition of any one of the preceding embodiments, wherein the siRNA molecule has the formula as illustrated in Formula III:

(III)
N₁N₂N₃N₄N₅N₆N₇N₈N₉N₁₀N₁₁N₁₂N₁₃
N₁₄N₁₅N₁₆N₁₇N₁₈N₁₉
Sense-strand (SS)
N₂₁N₂₀N₁₉N₁₈N₁₇N₁₆N₁₅N₁₄N₁₃N₁₂
N₁₁N₁₀N₉N₈N₇N₆N₅N₄N₃N₂N₁
Antisense-strand (AS),

[0354] wherein each nucleotide represented by N, is independently, A, U, C, or G or a modified nucleotide base, such as those provided for herein.

[0355] 14. The composition of embodiment 13, wherein the sense strand comprises a 2′O-methyl modified nucleotide with a phosphorothioate (PS)-modified backbone at N₁ and N₂, a 2′-fluoro modified nucleotide at N₃, N₇, N₈, N₉, N₁₂, and N₁₇, and a 2′O-methyl modified nucleotide at N₄, N₅, N₆, N₁₀, N₁₁, N₁₃, N₁₄, N₁₅, N₁₆, N₁₈, and N₁₉.

[0356] 15. The composition of embodiment 13, wherein the antisense strand comprises a vinyl phosphonate moiety with a phosphorothioate (PS) modified backbone attached at N₁, a 2′fluoro-modified nucleotide with a PS-modified backbone at N₂, a 2′O-methyl modified nucleotide at N₃, N₄, N₅, N₆, N₇, N₈, N₉, N₁₀, N₁₁, N₁₂, N₁₃, Nis, N₁₆, N₁₇, Nis, and N₁₉, a 2′fluoro-modified nucleotide at N₁₄, and a 2′O-methyl modified nucleotide with a PS-modified backbone at N₂₀ and N₂₁.

[0357] 16. The composition of embodiment 13, wherein the antisense strand comprises a vinyl phosphonate moiety is attached to N₁.

[0358] 17. The composition of any one of embodiments 13-16, wherein the siRNA molecule is conjugated to a linker as shown in the following formula:

[chemical structure]

[0359] 18. The composition of any one of the preceding embodiments, wherein the siRNA molecule has the formula as illustrated in Formula III:

[chemical structure]

[0360] wherein F₁ is a polypeptide comprising at least one FN3 domain.

[0361] 19. The composition of embodiment 18, wherein F₁ comprises polypeptide having a formula of (X₁)ₙ—(X₂)_{q}—(X₃)_{y}, wherein X₁ is a first FN3 domain; X₂ is a second FN3 domain; X₃ is a third FN3 domain or half-life extender molecule; wherein n, q, and y are each independently 0 or 1, provided that at least one of n, q, and y is 1.

[0362] 20. A composition comprising one or more FN3 domains conjugated to an siRNA molecule comprising a sense strand and an antisense strand that targets CD40, such as those provided for herein.

[0363] 21. The composition of embodiment 20, wherein the siRNA molecule does not contain any modified nucleobases.

[0364] 22. The composition of embodiment 20 or 21, wherein the siRNA molecule further comprises a linker.

[0365] 23. The composition of embodiment 22, wherein the linker is covalently attached to the sense strand or the antisense strand.

[0366] 24. The composition of embodiment 22 or 23, wherein the linker is attached to a 5′ end or a 3′ end of the sense strand or the antisense strand.

[0367] 25. The composition of any one of embodiments 20-24, wherein the siRNA molecule further comprises a vinyl phosphonate modification on the sense strand or the antisense strand.

[0368] 26. The composition of 25, wherein the vinyl phosphonate modification is attached to a 5′ end or a 3′ end of the sense strand or the antisense strand.

[0369] 27. The composition of any one of embodiments 20-26, wherein the sense strand comprises a nucleic acid sequence selected from any of SEQ ID NOs: 46-178, 312-331, 352-356, 673-805, and 939-958.

[0370] 28. The composition of any one of embodiments 20-26, wherein the antisense strand comprises a nucleic acid sequence selected from any of SEQ ID NOs: 179-311, 332-351, 356-359, 806-938, and 959-978.

[0371] 29. The composition of any one of embodiments 20-26, wherein the siRNA molecule comprises the siRNA pair of A1, B1, C1, D1, E1, F1, G1, H1, I1, J1, K1, L1, M1, N1, O1, P1, Q1, R1, S1, T1, U1, V1, W1, X1, Y1, Z1, A2, B2, C2, D2, E2, F2, G2, H2, I2, J2, K2, L2, M2, N2, O2, P2, Q2, R2, S2, T2, U2, V2, W2, X2, Y2, Z2, A3, B3, C3, D3, E3, F3, G3, H3, I3, J3, K3, L3, M3, N3, O3, P3, Q3, R3, S3, T3, U3, V3, W3, X3, Y3, Z3, A4, B4, C4, D4, E4, F4, G4, H4, I4, J4, K4, L4, M4, N4, O4, P4, Q4, R4, S4, T4, U4, V4, W4, X4, Y4, Z4, A5, B5, C5, D5, E5, F5, G5, H5, I5, J5, K5, L5, M5, N5, O5, P5, Q5, R5, S5, T5, U5, V5, W5, X5, Y5, Z5, A6, B6, C6, D6, E6, F6, G6, H6, I6, J6, K6, L6, M6, N6, O6, P6, Q6, R6, S6, T6, U6, V6, W6, B7, C7, P8, Q8, R8, S8, T8, U8, V8, W8, X8, Y8, Z8, A9, B9, C9, D9, E9, F9, G9, H9, I9, J9, K9, L9, M9, N9, O9, P9, Q9, R9, S9, T9, U9, V9, W9, X9, Y9, Z9, A10, B10, F10, G10, H10, I10, J10, K10, L10, M10, N10, O10, P10, Q10, R10, S10, T10, U10, V10, W10, X10, Y10, Z10, A11, B11, C11, D11, E11, F11, G11, H11, I11, J11, K11, L11, M11, N11, O11, P11, Q11, R11, or as set forth in Table 3A, Table 3B, Table 4A, Table 4B, Table 5A, or Table 5B.

[0372] 30. The composition of any one of embodiments 20-26, wherein the siRNA molecule comprises the siRNA pair as provided for in Table 3A, Table 3B, Table 4A, Table 4B, Table 5A, or Table 5B, with a linker and/or vinyl phosphonate modification as set forth herein.

[0373] 31. The composition of any one of embodiments 20-30, wherein the one or more FN3 domains comprises an FN3 domain conjugated to the siRNA molecule through a cysteine in the FN3 domain.

[0374] 32. The composition of embodiment 31, wherein the cysteine is at a position as described herein.

[0375] 33. The composition of embodiment 31 or 32, wherein the cysteine in the FN3 domain is at a position that corresponds to residue 6, 8, 10, 11, 14, 15, 16, 20, 30, 34, 38, 40, 41, 45, 47, 48, 53, 54, 59, 60, 62, 64, 70, 88, 89, 90, 91, or 93 of the FN3 domain based on SEQ ID NO: 2311.

[0376] 34. The composition of embodiment 33, wherein the cysteine is located at a position that corresponds to residue 6, 53, or 88.

[0377] 35. The composition of any one of embodiments 20-34, wherein the one or more FN3 domains comprises an FN3 domain that binds to CD71.

[0378] 36. The composition of any one of embodiments 20-35, wherein the one or more FN3 domains comprises an FN3 domain comprising an amino acid sequence that is at least 87%%, 88%, 89%, 90%, 91%, 92%, 93%, 94%, 95%, 96%, 97%, 98%, or 99% identical to or is identical to a sequence selected from any of SEQ ID NOs: 360-644, 663-672, and 1395-1849.

[0379] 37. The composition of embodiment 36, wherein the FN3 domain comprises an amino acid sequence that is at least 87% identical to a sequence selected from SEQ ID NOs: 360-644, 663-672, and 1395-1849.

[0380] 38. The composition of embodiment 36, wherein the FN3 domain comprises an amino acid sequence that is at least 88% identical to a sequence selected from SEQ ID NOs: 360-644, 663-672, and 1395-1849.

[0381] 39. The composition of embodiment 36, wherein the FN3 domain comprises an amino acid sequence that is at least 89% identical to a sequence selected from SEQ ID NOs: 360-644, 663-672, and 1395-1849.

[0382] 40. The composition of embodiment 36, wherein the FN3 domain comprises an amino acid sequence that is at least 90% identical to a sequence selected from SEQ ID NOs: 360-644, 663-672, and 1395-1849.

[0383] 41. The composition of embodiment 36, wherein the FN3 domain comprises an amino acid sequence that is at least 91% identical to a sequence selected from SEQ ID NOs: 360-644, 663-672, and 1395-1849.

[0384] 42. The composition of embodiment 36, wherein the FN3 domain comprises an amino acid sequence that is at least 92% identical to a sequence selected from SEQ ID NOs: 360-644, 663-672, and 1395-1849.

[0385] 43. The composition of embodiment 36, wherein the FN3 domain comprises an amino acid sequence that is at least 93% identical to a sequence selected from SEQ ID NOs: 360-644, 663-672, and 1395-1849.

[0386] 44. The composition of embodiment 36, wherein the FN3 domain comprises an amino acid sequence that is at least 93% identical to a sequence selected from SEQ ID NOs: 360-644, 663-672, and 1395-1849.

[0387] 45. The composition of embodiment 36, wherein the FN3 domain comprises an amino acid sequence that is at least 94% identical to a sequence selected from SEQ ID NOs: 360-644, 663-672, and 1395-1849.

[0388] 46. The composition of embodiment 36, wherein the FN3 domain comprises an amino acid sequence that is at least 94% identical to a sequence selected from SEQ ID NOs: 360-644, 663-672, and 1395-1849.

[0389] 47. The composition of embodiment 36, wherein the FN3 domain comprises an amino acid sequence that is at least 95% identical to a sequence selected from SEQ ID NOs: 360-644, 663-672, and 1395-1849.

[0390] 48. The composition of embodiment 36, wherein the FN3 domain comprises an amino acid sequence that is at least 96% identical to a sequence selected from SEQ ID NOs: 360-644, 663-672, and 1395-1849.

[0391] 49. The composition of embodiment 36, wherein the FN3 domain comprises an amino acid sequence that is at least 97% identical to a sequence selected from SEQ ID NOs: 360-644, 663-672, and 1395-1849.

[0392] 50. The composition of embodiment 36, wherein the FN3 domain comprises an amino acid sequence that is at least 98% identical to a sequence selected from SEQ ID NOs: 360-644, 663-672, and 1395-1849.

[0393] 51. The composition of embodiment 36, wherein the FN3 domain comprises an amino acid sequence that is at least 99% identical to a sequence selected from SEQ ID NOs: 360-644, 663-672, and 1395-1849.

[0394] 52. The composition of embodiment 36, wherein the FN3 domain comprises an amino acid sequence that is identical to a sequence selected from SEQ ID NOs: 360-644, 663-672, and 1395-1849.

[0395] 53. The composition of any one of embodiments 20-52, wherein the one or more FN3 domains comprises at least two FN3 domains linked by a peptide linker.

[0396] 54. The composition of embodiment 53, wherein the peptide linker comprises an amino acid sequence selected from any of SEQ ID NOs: 645-661.

[0397] 55. The composition of embodiment 53 or 54, wherein the one or more FN3 domains comprises a first FN3 domain and a second FN3 domain.

[0398] 56. The composition of embodiment 55, wherein the first FN3 domain comprises an amino acid sequence that is at least 87%%, 88%, 89%, 90%, 91%, 92%, 93%, 94%, 95%, 96%, 97%, 98%, or 99% identical to or is identical to a sequence selected from any of SEQ ID NOs: 360-644, 663-672, and 1395-1849.

[0399] 57. The composition of embodiment 55 or 66, wherein the first FN3 domain binds to CD71.

[0400] 58. The composition of any one of embodiments 55-57, wherein the second FN3 domain binds to a different target than the first FN3 domain.

[0401] 59. The composition of embodiment 58, wherein the second FN3 domain binds to albumin and comprises an amino acid sequence selected from any of SEQ ID NOs: 5-23, or a binding fragment thereof.

[0402] 60. The composition of any one of embodiments 55-57, wherein the second FN3 domain binds the same target as the first FN3 domain.

[0403] 61. The composition of any one of embodiments 20-60, further comprising a third FN3 domain.

[0404] 62. The composition of embodiment 61, wherein the third FN3 domain binds to CD71 or albumin.

[0405] 63. The composition of embodiment 62, wherein the FN3 domain that binds CD71 has an amino acid sequence as provided herein, including but not limited to any of SEQ ID NOs: 360-644, 663-672, and 1395-1849, or a binding fragment thereof.

[0406] 64. The composition of embodiment 63, wherein the FN3 domain that binds CD71 has a cysteine substitution as provided herein.

[0407] 65. The composition of embodiment 62, wherein the FN3 that binds albumin has an amino acid sequence as provided herein, including but not limited to any of SEQ ID NOs: 5-23, or a binding fragment thereof.

[0408] 66. The composition of embodiment 65, wherein the FN3 domain that binds CD71 has a cysteine substitution as provided herein.

[0409] 67. A composition having a formula of:

(X₁)ₙ—(X₂)_{q}—(X₃)_{y}-L-X₄;

C—(X₁)ₙ—(X₂)_{q}-L-X₄—(X₃)_{y};

(X₁)ₙ—(X₂)_{q}-L-X₄—(X₃)_{y}—C;

C—(X₁)ₙ—(X₂)_{q}-L-X₄-L-(X₃)_{y};

or (X₁)ₙ—(X₂)_{q}-L-X₄-L-(X₃)_{y}—C,

wherein:
[0410] X₁ is a first FN3 domain;
[0411] X₂ is a second FN3 domain;
[0412] X₃ is a third FN3 domain or a half-life extender molecule;
[0413] L is a linker;
[0414] X₄ is a nucleic acid molecule, such as an siRNA that targets CD40, such as those provided herein;
[0415] C is a polymer, such as PEG, albumin binding protein, or an aliphatic chain that binds to serum proteins; and/or
[0416] n, q, and y are each independently 0 or 1.

[0417] 68. The composition of embodiment 67, wherein X₁, X₂, and X₃ bind to the same or different target proteins.

[0418] 69. The composition of embodiment 67 or 68, wherein y is 0.

[0419] 70. The composition of embodiment 67 or 68, wherein n is 1, q is 0, and y is 0.

[0420] 71. The composition of embodiment 67 or 68, wherein n is 1, q is 1, and y is 0.

[0421] 72. The composition of embodiment 67 or 68, wherein n is 1, q is 1, and y is 1.

[0422] 73. The composition of any one of embodiments 67-72, wherein X₃ increases the half-life of the molecule as a whole as compared to a molecule without X₃.

[0423] 74. The composition of any one of embodiments 67-73, wherein X₃ is a third FN3 domain that binds to albumin.

[0424] 75. The composition of any one of embodiments 67-74, wherein the linker is a linker as provided herein.

[0425] 76. The composition of any one of embodiments 67-75, wherein the FN3 domains are connected by a peptide linker.

[0426] 77. The composition of embodiment 76, wherein the peptide linker comprise an amino acid sequence selected from any of SEQ ID NOs: 645-661 and combinations thereof.

[0427] 78. The composition of any one of embodiments 67-77, wherein the first, second, and/or third FN3 domain comprises an amino acid sequence as provided herein.

[0428] 79. The composition of any one of embodiments 67-78, wherein X₄ is an siRNA molecule that targets CD40.

[0429] 80. The composition of embodiment 79, wherein the siRNA molecule is an siRNA molecule as provided herein.

[0430] 81. The composition of embodiment 79 or 80, wherein the siRNA molecule reduces mRNA expression of CD40.

[0431] 82. The composition of any one of embodiments 79-81, wherein the siRNA molecule specifically reduces mRNA expression of CD40.

[0432] 83. The composition of any one of embodiments 79-82, wherein the siRNA molecule reduces mRNA expression of CD40 and does not significantly reduce expression of other mRNAs.

[0433] 84. The composition of any one of embodiments 79-83, wherein the siRNA molecule reduces mRNA expression of CD40 and does not reduce expression of other mRNAs by more than 50% in an assay described herein at a concentration of no more than 200 nm as described herein.

[0434] 85. The composition of any one of embodiments 79-84, wherein the siRNA molecule reduces mRNA expression of CD40 and reduces concentration of CD40 protein.

[0435] 86. The composition of embodiment 85, wherein the siRNA molecule reduces concentration of CD40 protein in a cell.

[0436] 87. The composition of embodiment 86, wherein the cell is an immune cell.

[0437] 88. The composition of embodiment 87, wherein the immune cell is a B cell, a T cell, or a dendritic cell.

[0438] 89. The composition of embodiment 88, wherein the immune cell is a B cell.

[0439] 90. The composition of embodiment 88, wherein the immune cell is a T cell.

[0440] 91. The composition of embodiment 88, wherein the immune cell is a dendritic cell.

[0441] 92. The composition of any one of embodiments 79-91, wherein the siRNA molecule comprises an siRNA pair as provided in the following formula:

[chemical structure]

[0442] 93. The composition of embodiment 92, wherein the antisense strand comprises a vinyl phosphonate modification at N₁.

[0443] 94. The composition of embodiment 92, wherein maleimide is hydrolyzed to form the following mixture of compounds, or one or both of each compound, or exclusively one of the following compounds:

[chemical structure]

[0444] 95. The composition of any one of embodiments 67-94, wherein the siRNA molecule comprises an siRNA pair as provided herein or an siRNA pair as provided for in Table 3A, Table 3B, Table 4A, Table 4B, Table 5A, or Table 5B.

[0445] 96. A composition having a formula A₁-B₁, wherein A₁ has a formula of (C)ₙ-(L₁)ₜ-X_{S} and
[0446] B₁ has a formula of X_{AS}-(L₂)_{q}-(F1)_{y},
   wherein:
[0447] C is a polymer, such as PEG, albumin binding protein, or an aliphatic chain that binds to serum proteins;
[0448] L₁ and L₂ are each, independently, a linker;
[0449] X_{S} is a 5′ to 3′ oligonucleotide sense strand of a double stranded siRNA molecule;
[0450] X_{AS} is a 3′ to 5′ oligonucleotide antisense strand of a double stranded siRNA molecule;
[0451] F₁ is a polypeptide comprising at least one FN3 domain;
[0452] n, t, q, and y are each independently 0 or 1; and/or
[0453] X_{S} and X_{AS} form a double stranded oligonucleotide molecule to form the composition/complex that targets CD40.

[0454] 97. A composition having a formula A₁-B₁, wherein A₁ has a formula of (F₁)˜-(L₁)ₜ-X_{S} and B₁ has a formula of X_{AS}-(L₂)_{q}-(C)_{y}, wherein:
[0455] C is a polymer, such as PEG, albumin binding protein, or an aliphatic chain that binds to serum proteins;
[0456] L₁ and L₂ are each, independently, a linker;
[0457] X_{S} is a 5′ to 3′ oligonucleotide sense strand of a double stranded siRNA molecule;
[0458] X_{AS} is a 3′ to 5′ oligonucleotide antisense strand of a double stranded siRNA molecule;
[0459] F₁ is a polypeptide comprising at least one FN3 domain;
[0460] n, t, q, and y are each independently 0 or 1; and/or
[0461] X_{S} and X_{AS} form a double stranded oligonucleotide molecule to form the composition/complex that targets CD40.

[0462] 98. The composition of embodiment 96 or 97, wherein L₁ has a formula of:

[chemical structure]

[0463] 99. The composition of embodiment 96 or 97, wherein L₂ has a formula of:

[chemical structure]

[0464] 100. The composition of embodiment 96 or 97, wherein A₁-B₁ has a formula of:

[chemical structure]

[0465] 101. The composition of embodiment 96 or 97, wherein A₁-B₁ has a formula of:

[chemical structure]

[0466] 102. The composition of embodiment 96 or 97, wherein F₁ comprises polypeptide having a formula of (X₁)ₙ—(X₂)_{q}—(X₃)_{y}, wherein X₁ is a first FN3 domain; X₂ is a second FN3 domain; X₃ is a third FN3 domain or a half-life extender molecule; wherein n, q, and y are each independently 0 or 1, provided that at least one of n, q, and y is 1.

[0467] 103. The composition of embodiment 96 or 97, wherein X₁ is a CD71 binding FN3 domain.

[0468] 104. The composition of embodiment 96 or 97, wherein X₂ is a CD71 binding FN3 domain.

[0469] 105. The composition of embodiment 96 or 97, wherein X₃ is an FN3 domain that binds to human serum albumin.

[0470] 106. The composition of embodiment 96 or 97, wherein X₃ is an Fc domain without effector function that extends the half-life of a protein.

[0471] 107. The composition of any one of embodiments 96-106, wherein X_{S} comprises a nucleic acid sequence selected from any of SEQ ID NOs: 46-178, 312-331, 352-356, 673-805, and 939-958.

[0472] 108. The composition of any one of embodiments 96-106, wherein X_{AS} comprises a nucleic acid sequence selected from any of SEQ ID NOs: 179-311, 332-351, 356-359, 806-938, and 959-978.

[0473] 109. The composition of any one of embodiments 96-106, wherein X_{S} and X_{AS} form an siRNA pair selected from any of A1, B1, C1, D1, E1, F1, G1, H1, I1, J1, K1, L1, M1, N1, O1, P1, Q1, R1, S1, T1, U1, V1, W1, X₁, Y1, Z1, A2, B2, C2, D2, E2, F2, G2, H2, I2, J2, K2, L2, M2, N2, O2, P2, Q2, R2, S2, T2, U2, V2, W2, X2, Y2, Z2, A3, B3, C3, D3, E3, F3, G3, H3, I3, J3, K3, L3, M3, N3, O3, P3, Q3, R3, S3, T3, U3, V3, W3, X3, Y3, Z3, A4, B4, C4, D4, E4, F4, G4, H4, I4, J4, K4, L4, M4, N4, O4, P4, Q4, R4, S4, T4, U4, V4, W4, X₄, Y4, Z4, A5, B5, C5, D5, E5, F5, G5, H5, I5, J5, K5, L5, M5, N5, O5, P5, Q5, R5, S5, T5, U5, V5, W5, X5, Y5, Z5, A6, B6, C6, D6, E6, F6, G6, H6, I6, J6, K6, L6, M6, N6, O6, P6, Q6, R6, S6, T6, U6, V6, W6, B7, C7, P8, Q8, R8, S8, T8, U8, V8, W8, X8, Y8, Z8, A9, B9, C9, D9, E9, F9, G9, H9, I9, J9, K9, L9, M9, N9, O9, P9, Q9, R9, S9, T9, U9, V9, W9, X9, Y9, Z9, A10, B10, F10, G10, H10, I10, J10, K10, L10, M10, N10, O10, P10, Q10, R10, S10, T10, U10, V10, W10, X10, Y10, Z10, A11, B11, C11, D11, E11, F11, G11, H11, I11, J11, K11, L11, M11, N11, O11, P11, Q11, R11, or as set forth in Table 3A, Table 3B, Table 4A, Table 4B, Table 5A, or Table 5B.

[0474] 110. The composition of any one of embodiments 96-106, wherein F₁ comprises an amino acid sequence that is at least 87%%, 88%, 89%, 90%, 91%, 92%, 93%, 94%, 95%, 96%, 97%, 98%, or 99% identical to or is identical to a sequence selected from any of SEQ ID NOs: 360-644, 663-672, and 1395-1849.

[0475] 111. The composition of embodiment 110, wherein F₁ comprises an amino acid sequence that is at least 87% identical to a sequence selected from any of SEQ ID NOs: 360-644, 663-672, and 1395-1849.

[0476] 112. The composition of embodiment 110, wherein F₁ comprises an amino acid sequence that is at least 88% identical to a sequence selected from any of SEQ ID NOs: 360-644, 663-672, and 1395-1849.

[0477] 113. The composition of embodiment 110, wherein F₁ comprises an amino acid sequence that is at least 89% identical to a sequence selected from SEQ ID NOs: 360-644, 663-672, and 1395-1849.

[0478] 114. The composition of embodiment 110, wherein F₁ comprises an amino acid sequence that is at least 90% identical to a sequence selected from SEQ ID NOs: 360-644, 663-672, and 1395-1849.

[0479] 115. The composition of embodiment 110, wherein F₁ comprises an amino acid sequence that is at least 91% identical to a sequence selected from SEQ ID NOs: 360-644, 663-672, and 1395-1849.

[0480] 116. The composition of embodiment 110, wherein F₁ comprises an amino acid sequence that is at least 92% identical to a sequence selected from SEQ ID NOs: 360-644, 663-672, and 1395-1849.

[0481] 117. The composition of embodiment 110, wherein F₁ comprises an amino acid sequence that is at least 93% identical to a sequence selected from SEQ ID NOs: 360-644, 663-672, and 1395-1849.

[0482] 118. The composition of embodiment 110, wherein F₁ comprises an amino acid sequence that is at least 93% identical to a sequence selected from SEQ ID NOs: 360-644, 663-672, and 1395-1849.

[0483] 119. The composition of embodiment 110, wherein F₁ comprises an amino acid sequence that is at least 94% identical to a sequence selected from SEQ ID NOs: 360-644, 663-672, and 1395-1849.

[0484] 120. The composition of embodiment 110, wherein F₁ comprises an amino acid sequence that is at least 94% identical to a sequence selected from of SEQ ID NOs: 360-644, 663-672, and 1395-1849.

[0485] 121. The composition of embodiment 110, wherein F₁ comprises an amino acid sequence that is at least 95% identical to a sequence selected from SEQ ID NOs: 360-644, 663-672, and 1395-1849.

[0486] 122. The composition of embodiment 110, wherein the FN3 domain comprises an amino acid sequence that is at least 96% identical to a sequence selected from SEQ ID NOs: 360-644, 663-672, and 1395-1849.

[0487] 123. The composition of embodiment 110, wherein F₁ comprises an amino acid sequence that is at least 97% identical to a sequence selected from SEQ ID NOs: 360-644, 663-672, and 1395-1849.

[0488] 124. The composition of embodiment 110, wherein F₁ comprises an amino acid sequence that is at least 98% identical to a sequence selected from SEQ ID NOs: 360-644, 663-672, and 1395-1849.

[0489] 125. The composition of embodiment 110, wherein F₁ comprises an amino acid sequence that is at least 99% identical to a sequence selected from SEQ ID NOs: 360-644, 663-672, and 1395-1849.

[0490] 126. The composition of embodiment 110, wherein F₁ comprises an amino acid sequence that is identical to a sequence selected from SEQ ID NOs: 360-644, 663-672, and 1395-1849.

[0491] 127. The composition of any one of embodiments 96-106, wherein F₁ comprises a polypeptide that binds to albumin.

[0492] 128. A pharmaceutical composition comprising a composition of any one of embodiments 1-127.

[0493] 129. A kit comprising a composition of any of embodiments 1-127.

[0494] 130. A method of treating immunological diseases in a subject in need thereof, the method comprising administering to the subject composition of any of embodiments 1-127 or any composition provided herein.

[0495] 131. A use of a composition as provided herein or of any of embodiments 1-127 in the preparation of a pharmaceutical composition or medicament for treating immunological diseases, such as autoimmune diseases provided herein.

[0496] 132. Use of a composition as provided herein or any of embodiments 1-127 for treating immunological disease.

[0497] 133. The use of embodiment 132, wherein the immunological disease is rheumatoid arthritis, Hashimoto's autoimmune thyroiditis, celiac disease, diabetes mellitus type 1, vitiligo, rheumatic fever, pernicious anemia/atrophic gastritis, alopecia areata, immune thrombocytopenic purpura, psoriasis, inflammatory bowel disease, systemic lupus erythematosus, pemphigus, Sjogren's syndrome, inflammatory myositis, lupus nephritis, Pemphigus vulgaris, multiple sclerosis, or prevention of solid organ transplant rejection.

[0498] 134. A method of reducing the expression of a target gene in a cell, such as an immune cell, the method comprising contacting the immune cell with a composition of any of embodiments 1-127 or a composition as provided herein.

[0499] 135. The method of embodiment 134, wherein the target gene is CD40.

[0500] 136. A method of delivering an siRNA molecule to a cell, such as an immune cell, in a subject, the method comprising administering to the subject a pharmaceutical composition comprising a composition of any of embodiments 1-127.

[0501] 137. The method of embodiment 136, wherein the cell is a CD71 positive cell.

[0502] 138. The method of embodiment 136 or 137, wherein the cell is an immune cell.

[0503] 139. The method of embodiment 138, wherein the immune cell is a B cell, a T cell, or a dendritic cell.

[0504] 140. The method of embodiment 139, wherein the immune cell is a B cell.

[0505] 141. The method of embodiment 139, wherein the immune cell is a T cell.

[0506] 142. The method of embodiment 139, wherein the immune cell is a dendritic cell.

[0507] 143. The method of any one of embodiments 136-142, wherein the siRNA molecule downregulates expression of a target gene in the cell.

[0508] 144. The method of embodiment 143, wherein the downregulation of expression of the target gene results in a reduction of about 99%, 90-99%, 50-90%, or 10-50%.

[0509] 145. The method of any one of embodiments 136-144, wherein the target gene is CD40.

[0510] 146. A method of delivering an siRNA molecule that targets CD40 to a CD71 positive immune cell in a subject, the method comprising administering to the subject a pharmaceutical composition comprising a composition of any of embodiments 1-127, wherein the siRNA molecule downregulates expression of CD40 in the CD71 positive immune cell.

[0511] 147. A method of reducing one or more cytokines in a population of CD71 positive immune cells, the method comprising contacting the population of CD71 positive immune cells with the composition of any one of embodiments 1-127.

[0512] 148. A method of reducing one or more cytokines in a subject, the method comprising administering to the subject the composition of any one of embodiments 1-127.

[0513] 149. A method of reducing one or more cytokines in a subject in need thereof, the method comprising administering to the subject in need thereof the composition of any one of embodiments 1-127.

[0514] 150. The method of embodiment 147, wherein the one or more cytokines is selected from IFN-γ, IL-6, TNF-α, IL-12, IP-10, and/or RANTES, or any combination thereof.

[0515] 151. The method of embodiment 147 or 148, wherein the one or more CD71 positive immune cells comprises a B cell, a T cell, a dendritic cell, or a combination thereof.

[0516] 152. A method of reducing or inhibiting migration of a population of cells from blood to tissue, the method comprising contacting a CD40 targeting siRNA molecule, such as those described herein, to the population of cells.

[0517] 153. The method of embodiment 152, wherein the population of cells comprises CD40 expressing cells.

[0518] 154. The method of embodiment 152 or 153, wherein the population of cells comprises dendritic cells, B cells, or a combination thereof.

[0519] 155. The method of any one of embodiments 152-154, wherein the tissue is lymphoid organ tissue.

### EXAMPLES

[0520] The following examples are illustrative of the embodiments disclosed herein. These examples are provided for the purpose of illustration only and the embodiments should in no way be construed as being limited to these examples, but rather should be construed to encompass any and all variations which become evidence as a result of the teaching provided herein. Those of skill in the art will readily recognize a variety of non-critical parameters that could be changed or modified to yield essentially similar results.

### Example 1: Cd40 siRNA Sequence Identification and Characterization

[0521] siRNA in silico screening: In silico siRNA screening was performed to identify an siRNA complementary to human CD40 mRNA. A flow chart depicting the steps and properties assessed during the screening is shown in FIG. 1. All possible 19-mer antisense sequences were generated from primary the human CD40 mRNA isoform sequence (NM_001250.6) and each 19-mer was assessed for complementarity against other relevant human CD40 isoforms. In silico cross-reactivity was further assessed in the transcriptomes of mouse, rat, and Cynomolgus macaque. A subset of well annotated transcripts from each model organism was assessed to determine cross reactivity (Table 17). Off-target effects were assessed by mapping both strands to the human RefSeq release 204 transcriptome using BOWTIE and identifying locations where the nucleotides in position 2-18 have alignments of 14, 15, 16, and 17 nucleotides respectively.

TABLE 17

| Species | Transcripts considered for activity |
|---|---|
| Human | NM_001250.6 |
| | NM_001302753.2 |
| | NM_001322421.2 |
| | NM_001362758.2 |
| | NM_152854.4 |
| | NM_001322422.2 |
| | XM_017028135.1 |
| | XM_017028136.1 |
| | XM_005260619.3 |
| | ENST00000372285.8 |
| | ENST00000372276.7 |
| | ENST00000620709.4 |
| Mouse | NM_011611.2 |
| | NM_170704.2 |
| | NM_170703.2 |
| | NM_170702.2 |
| | XM_006499155.5 |
| | XM_006499154.4 |
| | ENSMUST00000017799.11 |
| | ENSMUST00000073707.8 |
| Cynomolgus | XM_005569217.2 |
| Macaque | XM_005569218.2 |
| | XM_005569221.2 |
| | XM_005569219.2 |
| | XM_005569220.2 |
| | ENSMFAT00000070425.1 |
| | ENSMFAT00000070436.1 |
| Rat | NM_134360.1 |
| | XM_006235511.2 |
| | XM_008762464.1 |
| | XM_008762463.2 |
| | XM_008762465.1 |
| | ENSRNOT00000055148.4 |

[0522] Human siRNA target sites were assessed for common human polymorphisms (MAF>1%) NCBI dbSNP Build 2.0 153. Sequences that targeted a common allele were discarded. Next, siRNA off-target genes were assessed for sense and antisense strands in all relevant model organisms. siRNA molecules that did not overlap any common human genetic polymorphisms were considered candidates for synthesis. These candidates were prioritized for screening based on human off-target predictions. Those sequences containing relatively low number of off-target alignments to the transcriptome were selected for synthesis. Antisense position 1 was then replaced with a 5′ U (along with a corresponding 3′ sense A) and a 3′ UU was engineered into the antisense.

[0523] Oligonucleotide synthesis: Synthesis of oligonucleotides was performed on Mermade® 12 synthesizer using standard phosphoramidite chemistry on 500 Å controlled pore glass (CPG) with phosphoramidites at a 0.1 M concentration in acetonitrile. Iodine in THE/pyridine/water (0.02M) used as the oxidizing agent with 0.6 M ETT (5-ethylthiotetrazole) as the activation agent. N, N-dimethyl-N′-(3-thioxo-3H-1,2,4-dithiazol-5-yl)methanimidamide (DDTT), 0.09 M in pyridine, was used as the sulfurizing reagent for the introduction of phosphorothioate (PS) bonds. 3% (v/v) dichloroacetic acid in dichloromethane was used the deblocking solution. All single strands without maleimide were purified by ion-exchange chromatography with 20 mM phosphate at pH 8.5 as Buffer A and 20 mM phosphate pH 8.5 and 1 M sodium bromide as Buffer B. After purification, the oligonucleotide fractions were pooled, concentrated, and desalted. Desalted samples were then lyophilized to dryness and stored at −20° C.

[0524] Deprotection of antisense strands: After synthesis, the support was washed with acetonitrile (ACN) and dried in the column under vacuum and transferred into a 1 mL screw cap that could be tightly sealed and shaken with a solution of 5% diethylamine in aqueous ammonia at 65° C. for 5 h. Cleavage and deprotection of crude oligo was checked by liquid chromatography-mass spectrometry (LC-MS) and was subsequently purified by IEX-HPLC.

[0525] Synthesis, deprotection and annealing of maleimide-containing oligonucleotides: Maleimide containing oligos were made using either a 3′ amino-modified CPG solid support or a 5′ amino modifier phosphoramidite. The support was transferred into a 1 mL vial that could be tightly sealed and incubated with 50/50 v/v 40% aqueous methyl amine and aqueous ammonia (AMA) at room temperature for 2 h or 65° C. for 10 minutes to cleave and deprotect. The single strand was purified by ion-exchange chromatography and desalted the same conditions as the antisense before maleimide addition.

[0526] Approximately 20 mg/mL of the amine-modified sense strand in 0.05 M phosphate buffer at pH 7.1 was made to which 10 equivalents of the maleimide N-hydroxysuccinimide (NHS) ester, dissolved in ACN was added. The NHS ester solution was added to the aqueous oligonucleotide solution and shaken for 3 h at room temperature. The now maleimide conjugated oligonucleotides were purified by reverse-phase chromatography using 20 mM triethyl ammonium acetate with 80% acetonitrile in Buffer B as mobile phase.

[0527] After purification, the oligonucleotide fractions were pooled, concentrated, and desalted. To avoid hydrolysis of maleimide, duplexing of the sense and antisense strands was performed via freeze-drying using equimolar amounts of each desalted single strand.

[0528] FN3-siRNA conjugation and purification: FN3 domain-siRNA conjugates were prepared by conjugation of cysteine modified CD71-binding FN3 domains to maleimide containing siRNAs via cysteine-specific chemistry. For FN3-maleimide conjugation, cysteine-containing CD71-binding FN3 domains in PBS at 50-200 μM were reduced with 10 mM tris(2-carboxyethyl)phosphine (TCEP) at room temperature (30 mins) to yield a free thiol. To remove the TCEP, the FN3 protein was precipitated with saturated ammonium sulfate solution and then mixed with maleimide-modified siRNA duplex dissolved in water immediately prior at a molar ratio of ˜1.5:1 FN3:siRNA. After 1 hour incubation at RT or 37° C., reaction was quenched with N-ethyl maleimide (1 mM final NEM concentration in the reaction mixture).

[0529] To avoid loss of payload via retro-Michael reaction, maleimide ring hydrolysis is performed. Pooled fractions from conjugate are dialyzed into 25 mM TRIS pH 8.9 buffer. In this buffer the reaction is placed in an incubator shaker at 37° C. for 72 hrs. Reaction monitored for completion by LC-MS.

[0530] FN3 domain-siRNA conjugates were purified in two steps using IMAC chromatography (HisTrap HP) to remove unreacted siRNA linker, and anion exchange chromatography-Capto-DEAE; to remove unreacted FN3 proteins. FN3 domain-siRNA conjugates were characterized by PAGE, analytical size exclusion chromatography and LC/MS. Concentration of conjugate was calculated based on absorbance of conjugate solution at 260 using a Nanodrop.

[0531] In vitro screening 1: In vitro screen using single concentration to select first set of hits. Raji cells were electroporated with Neon 10 μl tips in the Neon Transfection System (Life Technologies) with settings 1300 V pulse voltage, 30 ms pulse width, and 1 pulse number. A single concentration of 20 nM of siRNA was used for electroporation. After electroporation, the cells were plated in RPMI-1640+10% heat-inactivated certified FBS+1% glutamax. The cells were incubated at 37° C. for 24 hours prior to lysis. Cells to Ct was used for qPCR. PGK1 was used as the endogenous control and RQ values were normalized to “electroporation of water only” control. SEQ ID NO of the siRNA sense strand used, relative CD40 expression, and KD % are shown in Tables 11, 12, and 13.

TABLE 11

| SEQ ID NO | Relative CD40 Expression | % KD |
|---|---|---|
| Cells Alone | 1.149254212 | −15% |
| Water | 1.003990555 | 0% |
| 46 | 0.909680702 | 9% |
| 47 | 0.743403529 | 26% |
| 48 | 0.703704739 | 30% |
| 49 | 0.947740379 | 5% |
| 50 | 0.864740935 | 14% |
| 51 | 0.62619472 | 37% |
| 52 | 0.768353208 | 23% |
| 53 | 0.987012714 | 1% |
| 54 | 0.869341663 | 13% |
| 55 | 0.841853463 | 16% |
| 56 | 0.817380579 | 18% |
| 57 | 0.552310134 | 45% |
| 58 | 1.082485112 | −8% |
| 59 | 1.042719552 | −4% |
| 60 | 0.899848414 | 10% |
| 61 | 0.880316424 | 12% |
| 62 | 0.664870191 | 34% |
| 63 | 0.729761005 | 27% |
| 64 | 0.902885713 | 10% |
| 65 | 0.729691208 | 27% |
| 66 | 0.590870903 | 41% |
| 67 | 0.798724017 | 20% |
| 68 | 0.774238883 | 23% |
| 69 | 0.743035586 | 26% |
| 70 | 0.983048203 | 2% |
| 71 | 0.993623025 | 1% |
| 72 | 0.875978927 | 12% |
| 73 | 1.135949571 | −14% |
| 74 | 1.053504041 | −5% |
| 75 | 1.008676715 | −1% |
| 76 | 0.948329523 | 5% |
| 77 | 1.091930907 | −9% |
| 78 | 1.034526434 | −3% |
| 79 | 0.924380748 | 8% |
| 80 | 1.121298524 | −12% |
| 81 | 0.984561964 | 2% |
| 82 | 0.978611164 | 2% |
| 83 | 0.881130218 | 12% |
| 84 | 1.320259339 | −32% |
| 85 | 0.928711683 | 7% |
| 86 | 0.990115269 | 1% |
| 87 | 1.024379909 | −2% |

TABLE 12

| SEQ ID NO | Relative CD40 Expression | % KD |
|---|---|---|
| Cells Alone | 1.343776 | −34% |
| Water | 1 | 0% |
| 101 | 0.831747016 | 17% |
| 102 | 0.81733404 | 18% |
| 103 | 0.563286873 | 44% |
| 104 | 0.680236801 | 32% |
| 105 | 0.748766708 | 25% |
| 106 | 1.210384159 | −21% |
| 107 | 0.626908315 | 37% |
| 108 | 0.824963716 | 18% |
| 109 | 0.586207223 | 41% |
| 110 | 0.538112572 | 46% |
| 111 | 0.498946757 | 50% |
| 112 | 0.704325487 | 30% |
| 113 | 0.812404254 | 19% |
| 114 | 0.514618913 | 49% |
| 115 | 0.531157496 | 47% |
| 116 | 1.121295754 | −12% |
| 117 | 1.045805998 | −5% |
| 118 | 0.617456337 | 38% |
| 119 | 0.988976941 | 1% |
| 120 | 0.937158154 | 6% |
| 121 | 0.625369433 | 37% |
| 122 | 0.661367656 | 34% |
| 123 | 0.443969715 | 56% |
| 124 | 0.558153316 | 44% |
| 125 | 0.745917202 | 25% |
| 126 | 0.71088051 | 29% |
| 127 | 0.776290399 | 22% |
| 128 | 0.350835076 | 65% |
| 129 | 0.396576832 | 60% |
| 130 | 0.394009796 | 61% |
| 131 | 0.565565057 | 43% |
| 132 | 0.666630372 | 33% |
| 133 | 0.860769602 | 14% |
| 134 | 0.457934389 | 54% |
| 135 | 0.801985609 | 20% |
| 136 | 1.089838975 | −9% |
| 137 | 1.068546521 | −7% |
| 138 | 0.751258525 | 25% |
| 139 | 0.714892672 | 29% |
| 140 | 0.543018731 | 46% |
| 141 | 0.470724331 | 53% |
| 142 | 0.437388094 | 56% |
| 143 | 0.49984402 | 50% |
| 144 | 0.474237371 | 53% |
| 145 | 0.331310913 | 67% |
| 146 | 0.504627385 | 50% |
| 147 | 0.814147169 | 19% |
| 148 | 0.872137532 | 13% |
| 149 | 0.927470102 | 7% |
| 150 | 0.767530331 | 23% |
| 151 | 0.702624434 | 30% |
| 152 | 0.865857788 | 13% |
| 153 | 0.972791933 | 3% |
| 154 | 0.947240401 | 5% |

TABLE 13

| SEQ ID NO | Relative CD40 Expression | % KD |
|---|---|---|
| Cells Alone | 1.122351745 | −12% |
| Water | 1 | 0% |
| 88 | 0.950617657 | 5% |
| 89 | 1.071355823 | −7% |
| 90 | 1.21709319 | −22% |
| 91 | 1.08442193 | −8% |
| 92 | 0.965247485 | 3% |
| 93 | 0.883124196 | 12% |
| 94 | 0.697111663 | 30% |
| 95 | 0.686988025 | 31% |
| 96 | 0.929588911 | 7% |
| 97 | 0.516791125 | 48% |
| 98 | 0.843864392 | 16% |
| 99 | 0.953386611 | 5% |
| 100 | 1.065865765 | −7% |
| 155 | 1.035884581 | −4% |
| 156 | 1.229445655 | −23% |
| 157 | 0.619988851 | 38% |
| 158 | 0.781808906 | 22% |
| 159 | 0.952489595 | 5% |
| 160 | 0.631758163 | 37% |
| 161 | 0.715872508 | 28% |
| 162 | 0.796020481 | 20% |
| 163 | 1.180848838 | −18% |
| 164 | 0.966813286 | 3% |
| 165 | 1.292063155 | −29% |
| 166 | 0.883030797 | 12% |
| 167 | 0.859540302 | 14% |
| 168 | 0.870443073 | 13% |
| 169 | 0.625400025 | 37% |
| 170 | 0.54956429 | 45% |
| 171 | 0.84474175 | 16% |
| 172 | 0.906642904 | 9% |
| 173 | 0.620974058 | 38% |
| 174 | 0.961299584 | 4% |
| 175 | 1.076118437 | −8% |
| 176 | 0.860515866 | 14% |
| 177 | 1.049361244 | −5% |
| 178 | 0.64558077 | 35% |

[0532] In vitro screening 2: Raji or A20 cells were electroporated with Neon 10 μl tips in the Neon Transfection System (Life Technologies) with settings 1300 V pulse voltage, 30 ms pulse width, and 1 pulse number for Raji or 1680 V pulse voltage, 20 ms pulse width, and 1 pulse for A20. A titration of siRNA was done for electroporation (2-fold dilutions were made starting at 300 nM). After electroporation, the cells were plated in RPMI-1640+10% heat-inactivated certified FBS+1% glutamax. The cells were incubated at 37° C. for 24 hours prior to lysis. Cells to Ct was used for qPCR. For Raji, PGK1, HPRT1, and UBE2D2 were used as endogenous controls and RQ values were normalized to “electroporation of water” control. For A20, B₂M, HPRT1, and PGK1 were used as endogenous controls and RQ values were normalized to “electroporation of water only” control. SEQ ID NO of the siRNA sense strand used, the KD % at 300 nM and the EC50 values are shown in Table 14 and Table 15 (Raji cells), and Table 16 and Table 17 (A20 cells). Titration curves corresponding to the sequences shown in Table 15 and Table 17 are shown in FIG. 2A and FIG. 2B, respectively.

TABLE 14

| SEQ ID NO | % KD at 300 nM | EC50 |
|---|---|---|
| 57 | 70% | 14.5 |
| 123 | 64% | 7.12 |
| 124 | 56% | 19.69 |
| 128 | 45% | 4.988 |
| 129 | 76% | 9.914 |
| 130 | 69% | 10.97 |
| 134 | 72% | 24.68 |
| 141 | 57% | 31.56 |
| 142 | 62% | 20.76 |
| 143 | 61% | 12.13 |
| 145 | 70% | 3.95 |

TABLE 15

| SEQ ID NO | % KD at 300 nM | EC50 |
|---|---|---|
| 328 | 65% | 8.194 |
| 332 | 61% | 9.342 |
| 333 | 59% | 11.48 |
| 314 | 78% | 6.852 |
| 315 | 73% | 20.39 |
| 316 | 61% | 4.03 |
| 329 | 61% | 10.29 |
| 330 | 57% | 4.835 |
| 317 | 67% | 9.59 |
| 331 | 46% | 3.077 |
| 318 | 67% | 3.91 |

TABLE 16

| SEQ ID NO | % KD at 300 nM | EC50 |
|---|---|---|
| 123 | 83% | 6.267 |
| 124 | 67% | 5.248 |

TABLE 17

| SEQ ID NO | % KD at 300 nM | EC50 |
|---|---|---|
| 332 | 87% | 3.557 |
| 333 | 73% | 13.45 |

### Example 2: Reduction of CD40 Expression by Administration of CD71-Binding FN3 Domain-CD40 siRNA Composition (Prophetic)

[0533] CD71-binding FN3 domains as provided herein are conjugated to CD40 siRNAs as provided herein and assayed to determine superior binding to immune cells, siRNA uptake, and reduction of CD40 expression in the target cells. Select compositions are formulated as pharmaceutical compositions as provided herein and administered to animal model having an autoimmune disease. CD40 expression is reduced in the targeted immune cells and the autoimmune disease is treated.

### Example 3: In Vitro Testing of siRNAs and Conjugates

[0534] Single dose and dose response curves using transfection reagent in SKBR3 and Cal27 cells: SKBR3 or Cal27 cells were reverse-transfected with a transfection reagent at 20,000 cells per well, using methods known to those of ordinary skill in the art. Briefly, siRNAs shown in Table 18 and the transfection reagent were diluted separately in reduced serum medium before combining at a 1:1 ratio. The mixture of transfection reagent and siRNAs was pipetted into 96 well flat-bottom plates and topped off with cells that were resuspended in antibiotic-free media containing RPMI 1640 and 10% fetal bovine serum. The cells were incubated at 37° C. for 24 hours and then cells were lysed for quantitative polymerase chain reaction (qPCR) analysis in SKBR3 cells. Bulk lysis reagents were used to lyse cells and RNA was isolated for measurement. PGK1 was used as the endogenous gene control. Relative quantification (RQ) values were normalized to the “transfection with transfection reagent only” control. Knockdown (KD) was also measured for the SKBR3 cell group. EC50 and Emax were determined for both SKBR3 and Cal27 cell groups. Table 18 shows relative CD40 mRNA expression, % KD at 10 nM, EC50 (pM), and Emax (%) are shown in each siRNA tested in SKBR3 cells and EC50 (pM) and Emax (%) for each siRNA tested in Cal27 cells. Relative CD40 mRNA expression was reduced in SKBR3 cells in vitro by about 77% to about 84% following treatment of the siRNAs listed in Table 18. Potency and maximal response were reduced after treatment of SKBR3 cells as compared to after treatment of Cal27 cells.

TABLE 18

| | | | Relative | | | | | |
|---|---|---|---|---|---|---|---|---|
| | Sense | Antisense | CD40 | | | | | |
| | Strand | Strand | mRNA | % KD at | EC50 | Emax | EC50 | Emax |
| | SEQ | SEQ | expression | 10 nM | (pM) | (%) | (pM) | (%) |
| siRNA ID | ID NO | ID NO | (SKBR3) | (SKBR3) | (SKBR3) | (SKBR3) | (Cal27) | (Cal27) |
| ABXO-1049 | 1890 | 2290 | 0.222 | 78 | 18.0 | 72.0 | 43.2 | 80 |
| ABXO-1050 | 1891 | 2291 | 0.166 | 83 | 6.0 | 74.0 | 23.8 | 83 |
| ABXO-1052 | 1893 | 2293 | 0.189 | 81 | 21.0 | 73.0 | 39.5 | 86 |
| ABXO-1059 | 1900 | 2010 | 0.202 | 80 | 36.0 | 79.0 | 64 | 86 |
| ABXO-537 | 315 | 335 | 0.163 | 84 | 19.0 | 75.0 | 114 | 85 |

[0535] Single dose and dose response curves using electroporation in A20 and C2C12 cells: A20 cells were electroporated at 50,000 cells per well with 10 μL tips at 1680 V pulse voltage, 20 ms pulse width, and 1 pulse. siRNAs in Table 19 were diluted in water for electroporation; water only was used as a control. After electroporation, the cells were plated in antibiotic-free medium containing RPMI 1640 and 10% fetal bovine serum. The cells were incubated at 37° C. for 24 hours prior to lysis. Bulk lysis reagents were used to lyse cells and RNA was isolated for measurement. B2M was used as the endogenous gene control. RQ values were normalized to control.

[0536] C2C12 cells were reverse transfected with a transfection reagent at 20,000 cells per well. Briefly, siRNAs and the transfection reagent were diluted separately in reduced serum medium before combining at a 1:1 ratio into a mixture. The mixture was pipetted into 96 well flat-bottom plates and topped off with cells that were resuspended in antibiotic-free medium containing RPMI 1640 and 10% fetal bovine serum. The cells were incubated at 37° C. for 24 hours prior to lysis. Cells to Ct was used for qPCR. B2M was used as the endogenous gene control. RQ values were normalized to the “transfection with transfection reagent only” control. Relative CD40 mRNA expression, % KD at 5 nM, EC50 (pM), and Emax (%) are shown in Table 19 for each conjugate tested in A20 cells; EC50 (pM) and Emax (%) are also shown for each siRNA tested in C2C12 cells. Relative CD40 mRNA expression was reduced in A20 cells in vitro following administration of some of the siRNAs listed below, in Table 19, namely. For example, relative CD40 mRNA expression was reduced in A20 cells in vitro by about 27.8% following administration of siRNA ABXO-1036.

TABLE 19

| | Relative CD40 | | | | | |
|---|---|---|---|---|---|---|
| | mRNA | | EC50 | | EC50 | Emax |
| | expression | % KD at | (nM) | Emax (%) | (pM) | (%) |
| siRNA ID | (A20) | 5 nM (A20) | (A20) | (A20) | (C2C12) | (C2C12) |
| ABXO-1022 | 0.764 | 24 | 6.1 | 83 | 62 | 94 |
| ABXO-1025 | 0.825 | 18 | 13 | 79 | 73 | 90 |
| ABXO-1036 | 0.722 | 28 | 0.63 | 73 | 15 | 94 |
| ABXO-1002 | 0.786 | 21 | 92.5 | 74 | N/A | N/A |
| ABXO-1003 | 0.827 | 17 | 161.3 | 70 | N/A | N/A |
| ABXO-1004 | 1.183 | 0 | N/A | N/A | N/A | N/A |
| ABXO-1005 | 0.885 | 12 | N/A | N/A | N/A | N/A |
| ABXO-1006 | 1.037 | 0 | N/A | N/A | N/A | N/A |
| ABXO-1007 | 1.095 | 0 | N/A | N/A | N/A | N/A |
| ABXO-1009 | 1.165 | 0 | N/A | N/A | N/A | N/A |
| ABXO-1010 | 0.88 | 12 | N/A | N/A | N/A | N/A |
| ABXO-1011 | 1.191 | 0 | N/A | N/A | N/A | N/A |
| ABXO-1012 | 1.12 | 0 | N/A | N/A | N/A | N/A |
| ABXO-1013 | 1.038 | 0 | N/A | N/A | N/A | N/A |
| ABXO-1014 | 1.06 | 0 | N/A | N/A | N/A | N/A |
| ABXO-1015 | 1.23 | 0 | N/A | N/A | N/A | N/A |
| ABXO-1016 | 1.07 | 0 | N/A | N/A | N/A | N/A |
| ABXO-1017 | 1.08 | 0 | N/A | N/A | N/A | N/A |
| ABXO-1018 | 0.919 | 8 | N/A | N/A | N/A | N/A |
| ABXO-1019 | 1.11 | 0 | N/A | N/A | N/A | N/A |
| ABXO-1028 | 0.947 | 5 | N/A | N/A | N/A | N/A |
| ABXO-1029 | 0.89 | 11 | N/A | N/A | N/A | N/A |
| ABXO-1030 | 1.14 | 0 | N/A | N/A | N/A | N/A |
| ABXO-1031 | 0.98 | 2 | N/A | N/A | N/A | N/A |
| ABXO-1032 | 1.19 | 0 | N/A | N/A | N/A | N/A |

[0537] Testing conjugates in dendritic cells (DCs) and SKBR3 cells: Dendritic cells (500,000 cells per well) and SKBR3 cells (50,000 cells per well) were treated with diluted conjugates and an activating agent for four days at 37° C. prior to cell lysis for qPCR. The media is composed of RPMI+10% fetal bovine serum+1% penicillin and streptomycin. For dendritic cells, RNA was extracted after cell lysis. For SKBR3 cells, bulk lysis reagents were used to lyse cells and RNA was isolated for measurement. For SKBR3 cells, PGK1 was used as the endogenous control and for dendritic cells, PGK1 and UBE2D2 were used as the endogenous control. Relative quantification (RQ) values were normalized to the “activated cells alone” control. Table 20 shows EC50 (in nM) and Emax (%) of the ABXC-83 and ABXC-225 conjugates tested in dendritic and SKBR3 cells, demonstrating potency and efficacy of the conjugates as compared to activated controls.

TABLE 20

| | | siRNA | siRNA | | | |
|---|---|---|---|---|---|---|
| | | Sense | Antisense | | | |
| Conjugate | Centyrin | Strand | Strand | | EC50 | Emax |
| ID | SEQ ID NO | SEQ ID NO | SEQ ID NO | Cell Type | (nM) | (%) |
| ABXC-83 | 570 | 354 | 358 | Dendritic Cell | 129 | 65 |
| ABXC-83 | 570 | 354 | 358 | Dendritic Cell | 14.9 | 49 |
| ABXC-83 | 570 | 354 | 358 | Dendritic Cell | 130 | 49 |
| ABXC-225 | 1849 | 354 | 358 | Dendritic Cell | 4.7 | 60 |
| ABXC-225 | 1849 | 354 | 358 | Dendritic Cell | 1.4 | 65 |
| ABXC-83 | 570 | 354 | 358 | SKBR3 | 4.7 | 65 |

### Example 4: In Vitro Administration of CD71-Binding FN3 Domains and CD40-Targeting siRNA Conjugates in Donated Human Dendritic Cells

[0538] Treatment with an exemplary composition comprising a CD71 FN3-CD40 siRNA conjugate, ABXC-79 (SEQ ID NOs: 1848, 354, 358), reduced expression of CD40 mRNA and reduced production of IL-12 in human dendritic cells activated and exposed to CD40 ligand. Dendritic cells (500,000 cells per well) were treated with 1 μM of conjugate and an activating agent for four days, followed by an additional activating agent for one day at 37° C. prior to collection of supernatants for electrochemiluminescence (ECL) immunoassay and cell lysis for qPCR. For ECL, a multiplex assay kit was used to quantify cytokines in the supernatants. The cell culture media used was composed of RPMI+10% fetal bovine serum+1% penicillin and streptomycin. For qPCR, RNA was extracted after cell lysis, and PGK1 and UBE2D2 were used as the endogenous controls in qPCR. Relative quantification (RQ) values were normalized to the “activated cells alone” control.

[0539] As shown in FIG. 3A, relative CD40 mRNA expression after treatment with was reduced by over 80% in cells from Donor 1, and reduced by about 60% in cells from Donor 2. As shown in FIG. 3B, IL-12 production (as measured in pg/mL) was reduced by about 80% in cells from Donor 1, and reduced by about 40% in cells from Donor 2. These results demonstrate functional activity of the CD71 FN3-CD40 siRNA conjugate in human dendritic cells.

### Example 5: In Vivo Administration in Rodent Models of Mouse Surrogates of CD71-Binding FN3 Domains and CD40-Targeting siRNA Conjugates

[0540] Male CD-1 mice under different experimental conditions (n=5 for each group) were treated on day −1, treated on day 0, and terminated on day 1, after which serum cytokine levels were quantified. There were three treatment groups, two of which were also activated on day 0. Group 1 was treated by administration of two mouse surrogates of CD71 FN3-CD40 siRNA conjugates, and activated prior to termination. Group 2 was treated by administration of buffered saline (“HBS”) and activated prior to termination. Group 3 (“Naïve”) was not treated and not activated prior to termination. Additionally, two other control groups were treated with siRNAs that were not specific for CD40 or a capped siRNA that is inactive against CD40. Administration of the mouse surrogate conjugates reduced serum cytokines and prevents margination of dendritic cells and B cells in vivo. Serum levels (as measured in pg/mL) of IFN-γ, IL-6, TNF-α, IL-12, IP-10, and RANTES were reduced following administration of the mouse surrogate conjugates.

[0541] Degree of reduction in CD40 expression was determined by administering an anti-CD40 agonist antibody, followed by measuring the amount of dendritic cells, B cells, and T cells via flow cytometric analysis. All treated control groups showed a reduction in numbers of dendritic cells and B cells after administration of the anti-CD40 agonist. By contrast, the experimental groups did not demonstrate the same level of reduction in dendritic cells and B cells, which indicates the ability of the exemplary conjugates in reducing CD40 expression in those cell types. CD40 negative T cells were not affected in any group, which demonstrates the specificity of the exemplary conjugates. Thus, these results demonstrate that exemplary conjugates can inhibit CD40 expression in dendritic cells and B cells, which, without being bound to any particular theory, indicates that that the migration of CD40-bearing dendritic cells and B cells was prevented or reduced.

[0542] These surprising results, and embodiments provided for herein, demonstrate that an siRNA molecule targeting CD40 can successfully be targeted to a subset of immune cells utilizing a FN3 domain that targets a cell surface protein, such as CD71, and that such constructs can selectively reduce CD40 expression in dendritic cells and B cells, and therefore, inhibit migration and margination of such cells, without affecting CD40 negative T cells. Accordingly, these compositions can be used to treat diseases mediated by dendritic and B cells and/or CD40 expression and activity, such as autoimmune diseases.

### Example 6: In Vitro Administration in Human Dendritic Cells of CD71-Binding FN3 Domains and CD40-Targeting siRNA Conjugates Reduced CD40 mRNA Expression and CD40 Protein Expression

[0543] Treatment with exemplary conjugates of CD71-binding FN3 domains and CD40-targeting siRNA, ABXC-285 (SEQ ID NOs: 570, 1941, 2051), ABXC-286 (SEQ ID NOs: 570, 1942, 2052), and ABXC-287 (SEQ ID NOs: 570, 1944, 2054), reduced expression of CD40 mRNA and reduced expression of CD40 protein in donated human dendritic cells.

[0544] Dendritic cells (500,000 cells per well) were treated with 1 μM of conjugate and an activating agent for four days in culture. The cell culture medium used was composed of RPMI, 10% fetal bovine serum, and 1% penicillin and streptomycin. On the fourth day, RNA was extracted after cell lysis and CD40 mRNA expression was quantified via qPCR. PGK1 and UBE2D2 were used as endogenous controls. Relative quantification (RQ) values were normalized to “activation only” control cells. Dendritic cells (500,000 cells per well) from the same donors underwent the same four-day treatment with conjugate and activating agent, as described above, and then remained in culture for 6-13 days after treatment. CD40 protein expression was measured via flow cytometry staining at 6, 8, 11, and 13 days after treatment. Relative expression values were normalized to “activation only” control cells.

[0545] Relative CD40 mRNA expression after treatment with conjugates was reduced by over 70% across two donors. As shown in FIG. 4 and in Table 21, below, relative CD40 mRNA expression was reduced by over 90% in cells from Donor 3, and by over 70% in cells from Donor 4.

TABLE 21
CD40 mRNA Knockdown

| | | siRNA | siRNA | | | | |
|---|---|---|---|---|---|---|---|
| | | Sense | Antisense | Donor 3 Dendritic Cells | | Donor 4 Dendritic Cells | |
| Conjugate | Centyrin | Strand | Strand | EC50 | % Knockdown | EC50 | % Knockdown |
| ID | SEQ ID NO | SEQ ID NO | SEQ ID NO | (nM) | at 1 μM | (nM) | at 1 μM |
| ABXC-285 | 570 | 1941 | 2051 | <10 | >90 | <10 | >70 |
| ABXC-286 | 570 | 1942 | 2052 | <10 | >90 | <10 | >75 |

[0546] Relative CD40 protein surface expression within one week after treatment with conjugates was reduced by over 50% in dendritic cells across two donors. As shown in FIG. 5, dendritic cells from Donor 3 showed a reduction in relative CD40 protein expression of about 40% by day 6 after treatment. By day 13, relative CD40 protein expression was reduced by over 70% in cells from Donor 3. Dendritic cells from Donor 4 showed a reduction in relative CD40 protein expression of about 50% by day 8 after treatment. By day 11, relative CD40 protein expression was reduced by over 60% in cells from Donor 4.

[0547] These results demonstrate the functional activity of CD71-binding FN3 domains and CD40-targeting siRNA conjugates in human dendritic cells in vitro.

### Example 7: In Vitro Administration in Human Dendritic Cells of CD71-Binding FN3 Domain and CD40-Targeting siRNA Conjugates Reduced Cytokine Production

[0548] When activated, CD40-expressing dendritic cells produce and release cytokines. Treatment with exemplary conjugates of CD71-binding FN3 domains and CD40-targeting siRNA, ABXC-326 (SEQ ID NOs: 570, 1890, 2290) and ABXC-328 (SEQ ID NOs: 570, 1893, 2293), reduced cytokine production in human dendritic cells activated and exposed to CD40 ligand in vitro.

[0549] Dendritic cells (500,000 cells per well) were treated with 1 μM of conjugate and an activating agent for seven days, followed by exposure to CD40 ligand for one day. The cell culture medium used was composed of RPMI, 10% fetal bovine serum, and 1% penicillin and streptomycin. Supernatants were collected and a multiplex assay kit was used to quantify amounts (in pg/mL) of cytokines via electrochemiluminescence (ECL) immunoassay.

[0550] Production of cytokines after conjugate treatment was reduced in dendritic cells across two donors. As shown in FIG. 6, IL-12 production was reduced by over 90% in dendritic cells from Donor 5 and Donor 6. TNF-α production was reduced by over 70% in cells from Donor 5, and reduced by over 90% in cells from Donor 6. IL-6 production was reduced by over 30% in cells from Donor 5 and Donor 6.

[0551] These results demonstrate functional activity of the CD71-binding FN3 domains and CD40-targeting siRNA conjugates in human dendritic cells in vitro.

### Example 8: In Vivo Administration in Mice of Mouse Surrogates of CD71-Binding FN3 Domain and CD40-Targeting siRNA Conjugates Reduced Serum Cytokine Levels

[0552] Treatment with mouse surrogates of CD71-binding FN3 domain and CD40-targeting siRNA conjugates reduced serum levels of cytokines associated with dendritic cell-mediated immune responses in mice in vivo.

[0553] Six groups, each consisting of five male CD1 mice, were exposed to differing conditions over the course of three days (day 0, day 1, day 2) before termination. Two groups were treated with two different mouse surrogates of conjugates comprising CD71-binding FN3 domains and CD40-targeting siRNA (“mouse surrogate 1” and “mouse surrogate 2”). One group was treated with a conjugate of CD71 Centyrins and an siRNA not targeting CD40 (“negative control”). One group was treated with CD71 Centyrins alone, not conjugated to any siRNA (“Centyrin only”). One group was treated with hepes buffered saline only (“vehicle”). The final group received no treatment throughout the experiment (“naïve”).

[0554] On day 0, an anti-CD40 agonist monoclonal antibody was administered to all groups except the naïve group, to activate CD40-expressing cells in vivo. Two hours after administration of the anti-CD40 agonist, all groups except for the naïve group received treatment with vehicle or drug. On day 1, all groups except the naïve group received treatment again with vehicle or drug in addition to anti-CD40 agonist, after which serum cytokine levels were measured (in pg/mL) for all groups. The following cytokines were measured due to their association with dendritic cell-mediated immune responses: IFN-γ, IL-6, TNF-α, IL-12p40, IP-10, and RANTES. On day 2, all subjects were terminated.

[0555] As shown in FIG. 7, mice in the naïve group, which were neither activated nor treated, showed very little amounts of any of the measured cytokines. By contrast, mice activated with an anti-CD40 agonist antibody and treated with vehicle, Centyrin only, or a negative control conjugate all displayed elevated levels of all measured cytokines relative to the naïve group, consistent with what one would expect in mice with activated CD40-expressing dendritic cells (not being bound by any particular theory). However, mice treated with mouse surrogates of CD71-CD40 conjugates experienced an almost total knockdown of IFN-γ and IL-6, comparable to levels in the naïve group. Surrogate-treated mice also showed very low levels of TNF-α, IL-12p40, IP-10, and RANTES comparable to, or statistically no different from, the naïve group. These mouse surrogates would correlate with what would be expected to be observed in human cells.

[0556] These surprising results, and embodiments provided for herein, demonstrate that an siRNA molecule targeting CD40 can successfully be targeted to a subset of immune cells utilizing a FN3 domain that targets a cell surface protein, such as CD71, and that such constructs can selectively reduce production of cytokines associated with an immune response. Accordingly, these compositions can be used to treat diseases mediated by dendritic and B cells and/or CD40 expression and activity, such as autoimmune diseases.

### Example 9: In Vivo Administration of Mouse Surrogates of CD71-Binding FN3 Domain and CD40-Targeting siRNA Conjugates Reduced Serum Cytokine Levels in a Rodent Model of CNS Autoimmune Disease and Inflammation

[0557] Experimental autoimmune encephalomyelitis (EAE) disease is a mouse model of autoimmune and inflammatory diseases in the central nervous system (CNS), such as, but not limited to, multiple sclerosis and amyotrophic lateral sclerosis. This experiment demonstrates the results of treating induced EAE mice with mouse surrogates of CD71-binding FN3 domain and CD40-targeting siRNA conjugates.

[0558] Four groups, each consisting of five female C57BL/6 mice, were exposed to differing conditions over the course of 12 days, before termination and before clinical symptoms began to manifest. One group was treated with a mouse surrogate of an exemplary CD71-CD40 conjugate as described herein, one group was treated with an anti-CD40 ligand clone (“positive control”), and one group was treated with hepes buffered saline (“vehicle”). The final group consisted of healthy mice that were neither treated nor induced to a diseased state (“naïve”).

[0559] On day 0, all groups except the naïve group were treated with drug or vehicle. On day 1, the treated groups were induced to have EAE by administration of MOG₃₅₋₅₅ in complete Freund's adjuvant, and received additional doses of drug or vehicle on days 1, 4, and 7. To quantify cytokine levels in the EAE model, serum was collected and analyzed via electrochemiluminescence (ECL) immunoassay to quantify IP-10, IL-12p70, IL-6, TNF-α, IFN-γ, and RANTES. To quantify immune cell frequency in the EAE model, spinal cord tissue and draining lymph node (dLN) tissue were collected for flow cytometry staining with the following antibodies: TCR-B, CD4, CD8, CD19, CD1 Ic, CD45, CD86, CD69, CD40, CXCR3, and CCR6.

[0560] As shown in FIG. 8, EAE mice treated only with vehicle showed the highest serum levels of all measured cytokines. EAE mice treated with mouse surrogate showed relatively lower serum levels of all measured cytokines as compared to EAE mice treated with vehicle. By contrast, EAE mice treated with positive control showed serum levels of IP-10, IL-6, TNF-α, RANTES comparable to EAE mice treated with mouse surrogate, but showed knockdown of IL-12p70 and IFN-γ. These results indicate that treatment with a mouse surrogate of a CD71-CD40 conjugate suppresses cytokine induction in the serum in an EAE model.

[0561] As shown in FIG. 9, all EAE mice showed a relatively higher proportion of B cells in dLN tissue as compared to spinal cord tissue. However, this difference was most pronounced in EAE mice treated with mouse surrogate. EAE mice treated with mouse surrogate showed the highest percentage of B cells in dLN tissue and the lowest percentage of B cells in spinal cord tissue as compared to EAE mice treated with vehicle or positive control. As shown in FIG. 10, EAE mice treated with mouse surrogate showed relatively lower proportions of dendritic cells, CD8 T cells, and CD4 T cells as compared to EAE mice treated with vehicle. Further, as shown in FIG. 11, EAE mice treated with mouse surrogate showed relatively lower proportions of lymphocytes, monocytes and macrophages in spinal cord tissue as compared to EAE mice treated with vehicle or positive control. These results indicate that treatment with a mouse surrogate of a CD71-CD40 conjugate suppressed B cell, dendritic cell, and T cell infiltration into the spinal cord. These mouse surrogates would correlate with what would be expected to be observed in other mammals, such as humans.

[0562] These surprising results, and embodiments provided for herein, demonstrate that an siRNA molecule targeting CD40 can successfully be targeted to a subset of immune cells utilizing a FN3 domain that targets a cell surface protein, such as CD71, and that such constructs can selectively reduce production of cytokines and suppress infiltration of immune cells into the central nervous system in an animal model of autoimmune disease. Accordingly, these compositions can be used to treat diseases mediated by dendritic and B cells and/or CD40 expression and activity, such as autoimmune diseases of the central nervous system, including but not limited to those provided for herein, and, for example, multiple sclerosis.

### Example 10: In Vitro Administration in SKBR3 Cells of CD40-Targeting siRNA Molecules Downregulates CD40 Expression with Limited Off-Target Interactions

[0563] This experiment demonstrates the results of administering CD40-targeting siRNAs to cells in vitro and measuring CD40 expression as a result. Two treatment groups of SKBR3 cells were transfected with two exemplary CD40-targeting siRNAs, ABXO-1049 (SEQ ID NOs: 1890, 2290) and ABXO-1052 (SEQ ID NOs: 1893, 2293), with lipofectamine at a concentration of 10 nM for 24 hours, with a control group of SKBR3 cells were treated only with lipofectamine, with 6 replicates per group. The concentration of 10 nM was selected because it is well past the concentration at which eMax is achieved for both siRNAs. mRNA was polyA+ selected from cells and subjected to unstranded 2×150 bp paired end sequencing to an average depth of >20 million reads.

[0564] The quality of the RNA-seq library was confirmed using FastQC. Libraries were pseudoaligned to the GrCH38.p13 human transcriptome using Kallisto. A read pseudoalignment rate average of 88.6% was achieved, demonstrating the good quality of the data. Differential expression was then assessed using DESeq2 comparing cells in each treatment group to cells in the control group. Any non-protein coding genes and genes express at less than 10 reads in 75% or greater of the libraries being compared were filtered out from downstream analyses. Significance of differential expression signal was calculated using the DESeq2 log 2 (fold-change) (LFC) threshold parameter, with which a 0.585 LFC baseline for statistical testing was applied. LFC shrinkage was estimated using AshR.

[0565] CD40 mRNA expression was substantially and significantly knocked down. CD40 expression in each of the two treatment groups was downregulated to 32% and 22% of the control group. CD40 was the most downregulated protein coding gene for all genes that were differentially expressed in both treatment groups.

[0566] In silico prediction of potential off-target effects was performed using BLAST and Bowtie aligners. The sense and antisense sequences of the exemplary siRNAs were aligned against internal databases built from the GRCh38 transcriptome. Of all the predicted potential off-target effects identified by these aligners, only one significantly downregulated off-target effect was identified in each siRNA.

[0567] In total, the first treatment group showed eight significant off-target effects detectable in these sequencing data, and second treatment group showed two significant off-target effects detectable. In the case of both siRNAs, these off-target signals were attributable to the antisense sequences.

[0568] Together, these data demonstrate that the exemplary CD40-targeting siRNAs are highly specific to CD40, with limited off-target interactions.

### Example 11: In Vitro Administration in Human Dendritic Cells of CD71-Binding FN3 Domains and CD40-Targeting siRNA Conjugates Reduced CD40 Protein Expression

[0569] Treatment with exemplary conjugates of CD71-binding FN3 domains and CD40-targeting siRNA, as detailed below in Table 22, knocked down expression of CD40 protein in donated human dendritic cells.

[0570] Dendritic cells (500,000 cells per well) were treated with 1 μM of conjugate and an activating agent for 11 days in culture. The cell culture medium used was composed of RPMI, 10% fetal bovine serum, and 1% penicillin and streptomycin. On day 11, CD40 protein expression was measured via flow cytometry using a CD40 antibody clone. Relative protein expression values were normalized to “activation only” control cells.

[0571] As shown in Table 22, below, expression of CD40 protein was knocked down by 50-82% in dendritic cells from three different human donors following administration of CD71-CD40 conjugates, relative to CD40 protein expression in activated control cells.

TABLE 22
CD40 Protein Knockdown

| | | siRNA | siRNA | | |
|---|---|---|---|---|---|
| | | Sense | Antisense | | % CD40 |
| | Centyrin | Strand | Strand | Dendritic | Protein |
| | SEQ | SEQ | SEQ | Cell | Knock- |
| Conjugate ID | ID NO | ID NO | ID NO | Donor | down |
| ABXC-285 | 570 | 1941 | 2051 | Donor 3 | 73% |
| ABXC-286 | 570 | 1942 | 2052 | Donor 3 | 73% |
| ABXC-287 | 570 | 1944 | 2054 | Donor 3 | 82% |
| ABXC-285 | 570 | 1941 | 2051 | Donor 4 | 57% |
| ABXC-286 | 570 | 1942 | 2052 | Donor 4 | 59% |
| ABXC-287 | 570 | 1944 | 2054 | Donor 4 | 71% |
| ABXC-326 | 570 | 1890 | 2290 | Donor 5 | 48% |
| ABXC-328 | 570 | 1893 | 2293 | Donor 5 | 50% |
| ABXC-326 | 570 | 1890 | 2290 | Donor 6 | 51% |
| ABXC-328 | 570 | 1893 | 2293 | Donor 6 | 66% |

[0572] These results demonstrate the functional activity of CD71-binding FN3 domains and CD40-targeting siRNA conjugates in human dendritic cells from multiple donors in vitro.

[0573] General Methods

[0574] Standard methods in molecular biology are described Sambrook, Fritsch and Maniatis (1982 & 1989 2^{nd} Edition, 2001 3^{rd} Edition) Molecular Cloning, A Laboratory Manual, Cold Spring Harbor Laboratory Press, Cold Spring Harbor, NY; Sambrook and Russell (2001) Molecular Cloning, 3^{rd} ed., Cold Spring Harbor Laboratory Press, Cold Spring Harbor, NY; Wu (1993) Recombinant DNA, Vol. 217, Academic Press, San Diego, CA). Standard methods also appear in Ausbel, et al. (2001) Current Protocols in Molecular Biology, Vols. 1-4, John Wiley and Sons, Inc. New York, NY, which describes cloning in bacterial cells and DNA mutagenesis (Vol. 1), cloning in mammalian cells and yeast (Vol. 2), glycoconjugates and protein expression (Vol. 3), and bioinformatics (Vol. 4).

[0575] Methods for protein purification including immunoprecipitation, chromatography, electrophoresis, centrifugation, and crystallization are described (Coligan, et al. (2000) Current Protocols in Protein Science, Vol. 1, John Wiley and Sons, Inc., New York). Chemical analysis, chemical modification, post-translational modification, production of fusion proteins, glycosylation of proteins are described (see, e.g., Coligan, et al. (2000) Current Protocols in Protein Science, Vol. 2, John Wiley and Sons, Inc., New York; Ausubel, et al. (2001) Current Protocols in Molecular Biology, Vol. 3, John Wiley and Sons, Inc., NY, NY, pp. 16.0.5-16.22.17; Sigma-Aldrich, Co. (2001) Products for Life Science Research, St.

[0576] Louis, MO; pp. 45-89; Amersham Pharmacia Biotech (2001) BioDirectory, Piscataway, N.J., pp. 384-391). Production, purification, and fragmentation of polyclonal and monoclonal antibodies are described (Coligan, et al. (2001) Current Protocols in Immunology, Vol. 1, John Wiley and Sons, Inc., New York; Harlow and Lane (1999) Using Antibodies, Cold Spring Harbor Laboratory Press, Cold Spring Harbor, NY; Harlow and Lane, supra). Standard techniques for characterizing ligand/receptor interactions are available (see, e.g., Coligan, et al. (2001) Current Protocols in Immunology, Vol. 4, John Wiley, Inc., New York).

[0577] All references cited herein are incorporated by reference to the same extent as if each individual publication, database entry (e.g., Genbank sequences or GeneID entries), patent application, or patent, was specifically and individually indicated to be incorporated by reference. This statement of incorporation by reference is intended by Applicants, pursuant to 37 C.F.R. § 1.57(b)(1), to relate to each and every individual publication, database entry (e.g., Genbank sequences or GeneID entries), patent application, or patent, each of which is clearly identified in compliance with 37 C.F.R. § 1.57(b)(2), even if such citation is not immediately adjacent to a dedicated statement of incorporation by reference. The inclusion of dedicated statements of incorporation by reference, if any, within the specification does not in any way weaken this general statement of incorporation by reference. Citation of the references herein is not intended as an admission that the reference is pertinent prior art, nor does it constitute any admission as to the contents or date of these publications or documents.

[0578] The present embodiments are not to be limited in scope by the specific embodiments described herein. Indeed, various modifications of the embodiments in addition to those described herein will become apparent to those skilled in the art from the foregoing description. Such modifications are intended to fall within the scope of the appended claims.

[0579] The foregoing written specification is considered to be sufficient to enable one skilled in the art to practice the embodiments. Various modifications of the embodiments in addition to those shown and described herein will become apparent to those skilled in the art from the foregoing description and fall within the scope of the appended claims.

The application's sequence listing, which the Patent Office published only in electronic form, follows.

SEQUENCE LISTING (2311 sequences)

SEQ ID NO: 1 - protein, 89 aa, synthetic construct
LPAPKNLVVSEVTEDSLRLSWTAPDAAFDSFLIQYQESEKVGEAINLTVPGSERSYDLTGLKPGTEYTVSIYGVKGGHRSNPLSAEFTT

SEQ ID NO: 2 - protein, 89 aa, synthetic construct
LPAPKNLVVSRVTEDSARLSWTAPDAAFDSFLIQYQESEKVGEAIVLTVPGSERSYDLTGLKPGTEYTVSIYGVKGGHRSNPLSAIFTT

SEQ ID NO: 3 - protein, 760 aa, Homo sapiens
MMDQARSAFSNLFGGEPLSYTRFSLARQVDGDNSHVEMKLAVDEEENADNNTKANVTKPKRCSGSICYGTIAVIVFFLIGFMIGYLGYCKGVEPKTECERLAGTESPVREEPGEDFPAARRLYWDDLKRKLSEKLDSTDFTGTIKLLNENSYVPREAGSQKDENLALYVENQFREFKLSKVWRDQHFVKIQVKDSAQNSVIIVDKNGRLVYLVENPGGYVAYSKAATVTGKLVHANFGTKKDFEDLYTPVNGSIVIVRAGKITFAEKVANAESLNAIGVLIYMDQTKFPIVNAELSFFGHAHLGTGDPYTPGFPSFNHTQFPPSRSSGLPNIPVQTISRAAAEKLFGNMEGDCPSDWKTDSTCRMVTSESKNVKLTVSNVLKEIKILNIFGVIKGFVEPDHYVVVGAQRDAWGPGAAKSGVGTALLLKLAQMFSDMVLKDGFQPSRSIIFASWSAGDFGSVGATEWLEGYLSSLHLKAFTYINLDKAVLGTSNFKVSASPLLYTLIEKTMQNVKHPVTGQFLYQDSNWASKVEKLTLDNAAFPFLAYSGIPAVSFCFCEDTDYPYLGTTMDTYKELIERIPELNKVARAAAEVAGQFVIKLTHDVELNLDYERYNSQLLSFVRDLNQYRADIKEMGLSLQWLYSARGDFFRATSRLTTDFGNAEKTDRFVMKKLNDRVMRVEYHFLSPYVSPKESPFRHVFWGSGSHTLPALLENLKLRKQNNGAFNETLFRNQLALATWTIQGAANALSGDVWDIDNEF

SEQ ID NO: 4 - protein, 672 aa, Homo sapiens
CKGVEPKTECERLAGTESPVREEPGEDFPAARRLYWDDLKRKLSEKLDSTDFTGTIKLLNENSYVPREAGSQKDENLALYVENQFREFKLSKVWRDQHFVKIQVKDSAQNSVIIVDKNGRLVYLVENPGGYVAYSKAATVTGKLVHANFGTKKDFEDLYTPVNGSIVIVRAGKITFAEKVANAESLNAIGVLIYMDQTKFPIVNAELSFFGHAHLGTGDPYTPGFPSFNHTQFPPSRSSGLPNIPVQTISRAAAEKLFGNMEGDCPSDWKTDSTCRMVTSESKNVKLTVSNVLKEIKILNIFGVIKGFVEPDHYVVVGAQRDAWGPGAAKSGVGTALLLKLAQMFSDMVLKDGFQPSRSIIFASWSAGDFGSVGATEWLEGYLSSLHLKAFTYINLDKAVLGTSNFKVSASPLLYTLIEKTMQNVKHPVTGQFLYQDSNWASKVEKLTLDNAAFPFLAYSGIPAVSFCFCEDTDYPYLGTTMDTYKELIERIPELNKVARAAAEVAGQFVIKLTHDVELNLDYERYNSQLLSFVRDLNQYRADIKEMGLSLQWLYSARGDFFRATSRLTTDFGNAEKTDRFVMKKLNDRVMRVEYHFLSPYVSPKESPFRHVFWGSGSHTLPALLENLKLRKQNNGAFNETLFRNQLALATWTIQGAANALSGDVWDIDNEF

SEQ ID NO: 5 - protein, 90 aa, synthetic construct
MLPAPKNLVASRVTEDSARLSWTAPDAAFDSFNIAYWEPGIGGEAIWLRVPGSERSYDLTGLKPGTEYKVWIHGVKGGASSPPLIARFTT

SEQ ID NO: 6 - protein, 90 aa, synthetic construct
MLPAPKNLVVSRVTEDSARLSWTAPDAAFDSFNIAYWEPGIGGEAIWLRVPGSERSYDLTGLKPGTEYKVWIHGVKGGASSPPLIARFTT

SEQ ID NO: 7 - protein, 90 aa, synthetic construct
MLPAPKNLVVSRVTEDSARLSWTAPDAAFDSFAIAYWEPGIGGEAIWLRVPGSERSYDLTGLKPGTEYKVWIHGVKGGASSPPLIARFTT

SEQ ID NO: 8 - protein, 90 aa, synthetic construct
MLPAPKNLVVSRVTEDSARLSWTAPDAAFDSFNISYWEPGIGGEAIWLRVPGSERSYDLTGLKPGTEYKVWIHGVKGGASSPPLIARFTT

SEQ ID NO: 9 - protein, 89 aa, synthetic construct
MLPAPKNLVVSRVTEDSARLSWTAPDAAFDSFNIAYAEPGIGGEAIWLRVPGSRSYDLTGLKPGTEYKVWIHGVKGGASSPPLIARFTT

SEQ ID NO: 10 - protein, 90 aa, synthetic construct
MLPAPKNLVVSRVTEDSARLSWTAPDAAFDSFNIAYWEAGIGGEAIWLRVPGSERSYDLTGLKPGTEYKVWIHGVKGGASSPPLIARFTT

SEQ ID NO: 11 - protein, 90 aa, synthetic construct
MLPAPKNLVVSRVTEDSARLSWTAPDAAFDSFNIAYWEPAIGGEAIWLRVPGSERSYDLTGLKPGTEYKVWIHGVKGGASSPPLIARFTT

SEQ ID NO: 12 - protein, 90 aa, synthetic construct
MLPAPKNLVVSRVTEDSARLSWTAPDAAFDSFNIAYWEPGAGGEAIWLRVPGSERSYDLTGLKPGTEYKVWIHGVKGGASSPPLIARFTT

SEQ ID NO: 13 - protein, 90 aa, synthetic construct
MLPAPKNLVVSRVTEDSARLSWTAPDAAFDSFNIAYWEPGIAGEAIWLRVPGSERSYDLTGLKPGTEYKVWIHGVKGGASSPPLIARFTT

SEQ ID NO: 14 - protein, 90 aa, synthetic construct
MLPAPKNLVVSRVTEDSARLSWTAPDAAFDSFNIAYWEPGIGGEAIALRVPGSERSYDLTGLKPGTEYKVWIHGVKGGASSPPLIARFTT

SEQ ID NO: 15 - protein, 90 aa, synthetic construct
MLPAPKNLVVSRVTEDSARLSWTAPDAAFDSFNIAYWEPGIGGEAIWLAVPGSERSYDLTGLKPGTEYKVWIHGVKGGASSPPLIARFTT

SEQ ID NO: 16 - protein, 90 aa, synthetic construct
MLPAPKNLVVSRVTEDSARLSWTAPDAAFDSFNIAYWEPGIGGEAIWLRVPGSERSYDLTGLKPGTEYAVWIHGVKGGASSPPLIARFTT

SEQ ID NO: 17 - protein, 90 aa, synthetic construct
MLPAPKNLVVSRVTEDSARLSWTAPDAAFDSFNIAYWEPGIGGEAIWLRVPGSERSYDLTGLKPGTEYKVAIHGVKGGASSPPLIARFTT

SEQ ID NO: 18 - protein, 90 aa, synthetic construct
MLPAPKNLVVSRVTEDSARLSWTAPDAAFDSFNIAYWEPGIGGEAIWLRVPGSERSYDLTGLKPGTEYKVWIAGVKGGASSPPLIARFTT

SEQ ID NO: 19 - protein, 90 aa, synthetic construct
MLPAPKNLVVSRVTEDSARLSWTAPDAAFDSFNIAYWEPGIGGEAIWLRVPGSERSYDLTGLKPGTEYKVWIHGVKGGSSSPPLIARFTT

SEQ ID NO: 20 - protein, 90 aa, synthetic construct
MLPAPKNLVVSRVTEDSARLSWTAPDAAFDSFNIAYWEPGIGGEAIWLRVPGSERSYDLTGLKPGTEYKVWIHGVKGGAASPPLIARFTT

SEQ ID NO: 21 - protein, 90 aa, synthetic construct
MLPAPKNLVVSRVTEDSARLSWTAPDAAFDSFNIAYWEPGIGGEAIWLRVPGSERSYDLTGLKPGTEYKVWIHGVKGGASSAPLIARFTT

SEQ ID NO: 22 - protein, 90 aa, synthetic construct
MLPAPKNLVVSRVTEDSARLSWTAPDAAFDSFNIAYWEPGIGGEAIWLRVPGSERSYDLTGLKPGTEYKVWIHGVKGGASSPPLAARFTT

SEQ ID NO: 23 - protein, 90 aa, synthetic construct
MLPAPKNLVVSRVTEDSARLSWTAPDAAFDSFNIAYWEPGIGGEAIWLRVPGSERSYDLTGLKPGTEYKVWIHGVKGGASSPPLIAAFTT

SEQ ID NO: 24 - protein, 9 aa, synthetic construct
RKKRRQRRR

SEQ ID NO: 25 - protein, 16 aa, synthetic construct
RQIKIWFQNRRMKWKK

SEQ ID NO: 26 - protein, 26 aa, synthetic construct
GWTLNSAGYLLGKINKALAALAKKIL

SEQ ID NO: 27 - protein, 18 aa, synthetic construct
KLALKLALKALKAALKLA

SEQ ID NO: 28 - protein, 21 aa, synthetic construct
KETWWETWWTEWSQPKKKRKV

SEQ ID NO: 29 - protein, 4 aa, synthetic construct
KDEL

SEQ ID NO: 30 - protein, 29 aa, synthetic construct
WEAALAEALAELAEHLAEALAEALEALAA

SEQ ID NO: 31 - protein, 21 aa, synthetic construct
GDIMGEWGNEIFGAIAGFLGC

SEQ ID NO: 32 - protein, 13 aa, synthetic construct
GLFDIIKKIAESF

SEQ ID NO: 33 - protein, 24 aa, synthetic construct
GALFLGWLGAAGSTMGAPKSKRKV

SEQ ID NO: 34 - protein, 21 aa, synthetic construct
AGYLLGKINLKALAALAKKIL

SEQ ID NO: 35 - protein, 23 aa, synthetic construct
LIRLWSHLIHIWFQNRRLKWKKK

SEQ ID NO: 36 - protein, 36 aa, synthetic construct
GLFGAIAGFIENGWEGMIDGRQIKIWFQNRRMKWKK

SEQ ID NO: 37 - protein, 26 aa, synthetic construct
FFKKLAHALHLLALLALHLAHALKKA

SEQ ID NO: 38 - protein, 21 aa, synthetic construct
LFEAIEGFIENGWGMIDGWYG

SEQ ID NO: 39 - protein, 31 aa, synthetic construct
LFEAIEGFIENGWEGMIDGWYGRKKRRQRRR

SEQ ID NO: 40 - protein, 25 aa, synthetic construct
IGAVLKVLTTGLPALISWIKRKRQQ

SEQ ID NO: 41 - protein, 21 aa, synthetic construct
MKLAVTLTLVTLALSSSSASA

SEQ ID NO: 42 - protein, 22 aa, synthetic construct
RLIEDICLPRWGCLWEDDKDEL

SEQ ID NO: 43 - protein, 17 aa, synthetic construct
MIRTLLLSTLVAGALSK

SEQ ID NO: 44 - protein, 19 aa, synthetic construct
ILSSLTVTQLLRRLHQWIK

SEQ ID NO: 45 - protein, 20 aa, synthetic construct
MIRTLLLSTLVAGALSKDEL

SEQ ID NO: 46 - DNA, 20 bp, synthetic construct
  source 1..20: mol_type = other DNA
  modified_base 1..2: mod_base = OTHER; note = 2'-O-methyl ribonucleotide
  modified_base 3: mod_base = OTHER; note = 2'-fluoro ribonucleotide
  modified_base 4..6: mod_base = OTHER; note = 2'-O-methyl ribonucleotide
  modified_base 7..9: mod_base = OTHER; note = 2'-fluoro ribonucleotide
  modified_base 10..11: mod_base = OTHER; note = 2'-O-methyl ribonucleotide
  modified_base 12: mod_base = OTHER; note = 2'-fluoro ribonucleotide
  modified_base 13..16: mod_base = OTHER; note = 2'-O-methyl ribonucleotide
  modified_base 17: mod_base = OTHER; note = 2'-fluoro ribonucleotide
  modified_base 18..19: mod_base = OTHER; note = 2'-O-methyl ribonucleotide
  modified_base 20: mod_base = OTHER; note = inverted deoxythymidine
  modified_base 1..3: mod_base = OTHER; note = phosphorothioate linkage
  misc_feature 1..19: note = RNA
  misc_feature 20: note = DNA
agaaccacccactgcatgat

SEQ ID NO: 47 - DNA, 20 bp, synthetic construct
  source 1..20: mol_type = other DNA
  modified_base 1..2: mod_base = OTHER; note = 2'-O-methyl ribonucleotide
  modified_base 3: mod_base = OTHER; note = 2'-fluoro ribonucleotide
  modified_base 4..6: mod_base = OTHER; note = 2'-O-methyl ribonucleotide
  modified_base 7..9: mod_base = OTHER; note = 2'-fluoro ribonucleotide
  modified_base 10..11: mod_base = OTHER; note = 2'-O-methyl ribonucleotide
  modified_base 12: mod_base = OTHER; note = 2'-fluoro ribonucleotide
  modified_base 13..16: mod_base = OTHER; note = 2'-O-methyl ribonucleotide
  modified_base 17: mod_base = OTHER; note = 2'-fluoro ribonucleotide
  modified_base 18..19: mod_base = OTHER; note = 2'-O-methyl ribonucleotide
  modified_base 20: mod_base = OTHER; note = inverted deoxythymidine
  modified_base 1..3: mod_base = OTHER; note = phosphorothioate linkage
  misc_feature 1..19: note = RNA
  misc_feature 20: note = DNA
agaaaaacagtacctaatat

SEQ ID NO: 48 - DNA, 20 bp, synthetic construct
  source 1..20: mol_type = other DNA
  modified_base 1..2: mod_base = OTHER; note = 2'-O-methyl ribonucleotide
  modified_base 3: mod_base = OTHER; note = 2'-fluoro ribonucleotide
  modified_base 4..6: mod_base = OTHER; note = 2'-O-methyl ribonucleotide
  modified_base 7..9: mod_base = OTHER; note = 2'-fluoro ribonucleotide
  modified_base 10..11: mod_base = OTHER; note = 2'-O-methyl ribonucleotide
  modified_base 12: mod_base = OTHER; note = 2'-fluoro ribonucleotide
  modified_base 13..16: mod_base = OTHER; note = 2'-O-methyl ribonucleotide
  modified_base 17: mod_base = OTHER; note = 2'-fluoro ribonucleotide
  modified_base 18..19: mod_base = OTHER; note = 2'-O-methyl ribonucleotide
  modified_base 20: mod_base = OTHER; note = inverted deoxythymidine
  modified_base 1..3: mod_base = OTHER; note = phosphorothioate linkage
  misc_feature 1..19: note = RNA
  misc_feature 20: note = DNA
gaaactggtgagtgactgat

SEQ ID NO: 49 - DNA, 20 bp, synthetic construct
  source 1..20: mol_type = other DNA
  modified_base 1..2: mod_base = OTHER; note = 2'-O-methyl ribonucleotide
  modified_base 3: mod_base = OTHER; note = 2'-fluoro ribonucleotide
  modified_base 4..6: mod_base = OTHER; note = 2'-O-methyl ribonucleotide
  modified_base 7..9: mod_base = OTHER; note = 2'-fluoro ribonucleotide
  modified_base 10..11: mod_base = OTHER; note = 2'-O-methyl ribonucleotide
  modified_base 12: mod_base = OTHER; note = 2'-fluoro ribonucleotide
  modified_base 13..16: mod_base = OTHER; note = 2'-O-methyl ribonucleotide
  modified_base 17: mod_base = OTHER; note = 2'-fluoro ribonucleotide
  modified_base 18..19: mod_base = OTHER; note = 2'-O-methyl ribonucleotide
  modified_base 20: mod_base = OTHER; note = inverted deoxythymidine
  modified_base 1..3: mod_base = OTHER; note = phosphorothioate linkage
  misc_feature 1..19: note = RNA
  misc_feature 20: note = DNA
aaactggtgagtgactgcat

SEQ ID NO: 50 - DNA, 20 bp, synthetic construct
  source 1..20: mol_type = other DNA
  modified_base 1..2: mod_base = OTHER; note = 2'-O-methyl ribonucleotide
  modified_base 3: mod_base = OTHER; note = 2'-fluoro ribonucleotide
  modified_base 4..6: mod_base = OTHER; note = 2'-O-methyl ribonucleotide
  modified_base 7..9: mod_base = OTHER; note = 2'-fluoro ribonucleotide
  modified_base 10..11: mod_base = OTHER; note = 2'-O-methyl ribonucleotide
  modified_base 12: mod_base = OTHER; note = 2'-fluoro ribonucleotide
  modified_base 13..16: mod_base = OTHER; note = 2'-O-methyl ribonucleotide
  modified_base 17: mod_base = OTHER; note = 2'-fluoro ribonucleotide
  modified_base 18..19: mod_base = OTHER; note = 2'-O-methyl ribonucleotide
  modified_base 20: mod_base = OTHER; note = inverted deoxythymidine
  modified_base 1..3: mod_base = OTHER; note = phosphorothioate linkage
  misc_feature 1..19: note = RNA
  misc_feature 20: note = DNA
agttcactgaaacggaatat

SEQ ID NO: 51 - DNA, 20 bp, synthetic construct
  source 1..20: mol_type = other DNA
  modified_base 1..2: mod_base = OTHER; note = 2'-O-methyl ribonucleotide
  modified_base 3: mod_base = OTHER; note = 2'-fluoro ribonucleotide
  modified_base 4..6: mod_base = OTHER; note = 2'-O-methyl ribonucleotide
  modified_base 7..9: mod_base = OTHER; note = 2'-fluoro ribonucleotide
  modified_base 10..11: mod_base = OTHER; note = 2'-O-methyl ribonucleotide
  modified_base 12: mod_base = OTHER; note = 2'-fluoro ribonucleotide
  modified_base 13..16: mod_base = OTHER; note = 2'-O-methyl ribonucleotide
  modified_base 17: mod_base = OTHER; note = 2'-fluoro ribonucleotide
  modified_base 18..19: mod_base = OTHER; note = 2'-O-methyl ribonucleotide
  modified_base 20: mod_base = OTHER; note = inverted deoxythymidine
  modified_base 1..3: mod_base = OTHER; note = phosphorothioate linkage
  misc_feature 1..19: note = RNA
  misc_feature 20: note = DNA
ggaatgccttccttgcggat

SEQ ID NO: 52 - DNA, 20 bp, synthetic construct
  source 1..20: mol_type = other DNA
  modified_base 1..2: mod_base = OTHER; note = 2'-O-methyl ribonucleotide
  modified_base 3: mod_base = OTHER; note = 2'-fluoro ribonucleotide
  modified_base 4..6: mod_base = OTHER; note = 2'-O-methyl ribonucleotide
  modified_base 7..9: mod_base = OTHER; note = 2'-fluoro ribonucleotide
  modified_base 10..11: mod_base = OTHER; note = 2'-O-methyl ribonucleotide
  modified_base 12: mod_base = OTHER; note = 2'-fluoro ribonucleotide
  modified_base 13..16: mod_base = OTHER; note = 2'-O-methyl ribonucleotide
  modified_base 17: mod_base = OTHER; note = 2'-fluoro ribonucleotide
  modified_base 18..19: mod_base = OTHER; note = 2'-O-methyl ribonucleotide
  modified_base 20: mod_base = OTHER; note = inverted deoxythymidine
  modified_base 1..3: mod_base = OTHER; note = phosphorothioate linkage
  misc_feature 1..19: note = RNA
  misc_feature 20: note = DNA
tgccttccttgcggtgaaat

SEQ ID NO: 53 - DNA, 20 bp, synthetic construct
  source 1..20: mol_type = other DNA
  modified_base 1..2: mod_base = OTHER; note = 2'-O-methyl ribonucleotide
  modified_base 3: mod_base = OTHER; note = 2'-fluoro ribonucleotide
  modified_base 4..6: mod_base = OTHER; note = 2'-O-methyl ribonucleotide
  modified_base 7..9: mod_base = OTHER; note = 2'-fluoro ribonucleotide
  modified_base 10..11: mod_base = OTHER; note = 2'-O-methyl ribonucleotide
  modified_base 12: mod_base = OTHER; note = 2'-fluoro ribonucleotide
  modified_base 13..16: mod_base = OTHER; note = 2'-O-methyl ribonucleotide
  modified_base 17: mod_base = OTHER; note = 2'-fluoro ribonucleotide
  modified_base 18..19: mod_base = OTHER; note = 2'-O-methyl ribonucleotide
  modified_base 20: mod_base = OTHER; note = inverted deoxythymidine
  modified_base 1..3: mod_base = OTHER; note = phosphorothioate linkage
  misc_feature 1..19: note = RNA
  misc_feature 20: note = DNA
gccttccttgcggtgaaaat

SEQ ID NO: 54 - DNA, 20 bp, synthetic construct
  source 1..20: mol_type = other DNA
  modified_base 1..2: mod_base = OTHER; note = 2'-O-methyl ribonucleotide
  modified_base 3: mod_base = OTHER; note = 2'-fluoro ribonucleotide
  modified_base 4..6: mod_base = OTHER; note = 2'-O-methyl ribonucleotide
  modified_base 7..9: mod_base = OTHER; note = 2'-fluoro ribonucleotide
  modified_base 10..11: mod_base = OTHER; note = 2'-O-methyl ribonucleotide
  modified_base 12: mod_base = OTHER; note = 2'-fluoro ribonucleotide
  modified_base 13..16: mod_base = OTHER; note = 2'-O-methyl ribonucleotide
  modified_base 17: mod_base = OTHER; note = 2'-fluoro ribonucleotide
  modified_base 18..19: mod_base = OTHER; note = 2'-O-methyl ribonucleotide
  modified_base 20: mod_base = OTHER; note = inverted deoxythymidine
  modified_base 1..3: mod_base = OTHER; note = phosphorothioate linkage
  misc_feature 1..19: note = RNA
  misc_feature 20: note = DNA
ccttccttgcggtgaaagat

SEQ ID NO: 55 - DNA, 20 bp, synthetic construct
  source 1..20: mol_type = other DNA
  modified_base 1..2: mod_base = OTHER; note = 2'-O-methyl ribonucleotide
  modified_base 3: mod_base = OTHER; note = 2'-fluoro ribonucleotide
  modified_base 4..6: mod_base = OTHER; note = 2'-O-methyl ribonucleotide
  modified_base 7..9: mod_base = OTHER; note = 2'-fluoro ribonucleotide
  modified_base 10..11: mod_base = OTHER; note = 2'-O-methyl ribonucleotide
  modified_base 12: mod_base = OTHER; note = 2'-fluoro ribonucleotide
  modified_base 13..16: mod_base = OTHER; note = 2'-O-methyl ribonucleotide
  modified_base 17: mod_base = OTHER; note = 2'-fluoro ribonucleotide
  modified_base 18..19: mod_base = OTHER; note = 2'-O-methyl ribonucleotide
  modified_base 20: mod_base = OTHER; note = inverted deoxythymidine
  modified_base 1..3: mod_base = OTHER; note = phosphorothioate linkage
  misc_feature 1..19: note = RNA
  misc_feature 20: note = DNA
cttccttgcggtgaaagcat

SEQ ID NO: 56 - DNA, 20 bp, synthetic construct
  source 1..20: mol_type = other DNA
  modified_base 1..2: mod_base = OTHER; note = 2'-O-methyl ribonucleotide
  modified_base 3: mod_base = OTHER; note = 2'-fluoro ribonucleotide
  modified_base 4..6: mod_base = OTHER; note = 2'-O-methyl ribonucleotide
  modified_base 7..9: mod_base = OTHER; note = 2'-fluoro ribonucleotide
  modified_base 10..11: mod_base = OTHER; note = 2'-O-methyl ribonucleotide
  modified_base 12: mod_base = OTHER; note = 2'-fluoro ribonucleotide
  modified_base 13..16: mod_base = OTHER; note = 2'-O-methyl ribonucleotide
  modified_base 17: mod_base = OTHER; note = 2'-fluoro ribonucleotide
  modified_base 18..19: mod_base = OTHER; note = 2'-O-methyl ribonucleotide
  modified_base 20: mod_base = OTHER; note = inverted deoxythymidine
  modified_base 1..3: mod_base = OTHER; note = phosphorothioate linkage
  misc_feature 1..19: note = RNA
  misc_feature 20: note = DNA
ttccttgcggtgaaagcgat

SEQ ID NO: 57 - DNA, 20 bp, synthetic construct
  source 1..20: mol_type = other DNA
  modified_base 1..2: mod_base = OTHER; note = 2'-O-methyl ribonucleotide
  modified_base 3: mod_base = OTHER; note = 2'-fluoro ribonucleotide
  modified_base 4..6: mod_base = OTHER; note = 2'-O-methyl ribonucleotide
  modified_base 7..9: mod_base = OTHER; note = 2'-fluoro ribonucleotide
  modified_base 10..11: mod_base = OTHER; note = 2'-O-methyl ribonucleotide
  modified_base 12: mod_base = OTHER; note = 2'-fluoro ribonucleotide
  modified_base 13..16: mod_base = OTHER; note = 2'-O-methyl ribonucleotide
  modified_base 17: mod_base = OTHER; note = 2'-fluoro ribonucleotide
  modified_base 18..19: mod_base = OTHER; note = 2'-O-methyl ribonucleotide
  modified_base 20: mod_base = OTHER; note = inverted deoxythymidine
  modified_base 1..3: mod_base = OTHER; note = phosphorothioate linkage
  misc_feature 1..19: note = RNA
  misc_feature 20: note = DNA
tccttgcggtgaaagcgaat

SEQ ID NO: 58 - DNA, 20 bp, synthetic construct
  source 1..20: mol_type = other DNA
  modified_base 1..2: mod_base = OTHER; note = 2'-O-methyl ribonucleotide
  modified_base 3: mod_base = OTHER; note = 2'-fluoro ribonucleotide
  modified_base 4..6: mod_base = OTHER; note = 2'-O-methyl ribonucleotide
  modified_base 7..9: mod_base = OTHER; note = 2'-fluoro ribonucleotide
  modified_base 10..11: mod_base = OTHER; note = 2'-O-methyl ribonucleotide
  modified_base 12: mod_base = OTHER; note = 2'-fluoro ribonucleotide
  modified_base 13..16: mod_base = OTHER; note = 2'-O-methyl ribonucleotide
  modified_base 17: mod_base = OTHER; note = 2'-fluoro ribonucleotide
  modified_base 18..19: mod_base = OTHER; note = 2'-O-methyl ribonucleotide
  modified_base 20: mod_base = OTHER; note = inverted deoxythymidine
  modified_base 1..3: mod_base = OTHER; note = phosphorothioate linkage
  misc_feature 1..19: note = RNA
  misc_feature 20: note = DNA
ccttgcggtgaaagcgaaat

SEQ ID NO: 59 - DNA, 20 bp, synthetic construct
  source 1..20: mol_type = other DNA
  modified_base 1..2: mod_base = OTHER; note = 2'-O-methyl ribonucleotide
  modified_base 3: mod_base = OTHER; note = 2'-fluoro ribonucleotide
  modified_base 4..6: mod_base = OTHER; note = 2'-O-methyl ribonucleotide
  modified_base 7..9: mod_base = OTHER; note = 2'-fluoro ribonucleotide
  modified_base 10..11: mod_base = OTHER; note = 2'-O-methyl ribonucleotide
  modified_base 12: mod_base = OTHER; note = 2'-fluoro ribonucleotide
  modified_base 13..16: mod_base = OTHER; note = 2'-O-methyl ribonucleotide
  modified_base 17: mod_base = OTHER; note = 2'-fluoro ribonucleotide
  modified_base 18..19: mod_base = OTHER; note = 2'-O-methyl ribonucleotide
  modified_base 20: mod_base = OTHER; note = inverted deoxythymidine
  modified_base 1..3: mod_base = OTHER; note = phosphorothioate linkage
  misc_feature 1..19: note = RNA
  misc_feature 20: note = DNA
cttgcggtgaaagcgaatat

SEQ ID NO: 60 - DNA, 20 bp, synthetic construct
  source 1..20: mol_type = other DNA
  modified_base 1..2: mod_base = OTHER; note = 2'-O-methyl ribonucleotide
  modified_base 3: mod_base = OTHER; note = 2'-fluoro ribonucleotide
  modified_base 4..6: mod_base = OTHER; note = 2'-O-methyl ribonucleotide
  modified_base 7..9: mod_base = OTHER; note = 2'-fluoro ribonucleotide
  modified_base 10..11: mod_base = OTHER; note = 2'-O-methyl ribonucleotide
  modified_base 12: mod_base = OTHER; note = 2'-fluoro ribonucleotide
  modified_base 13..16: mod_base = OTHER; note = 2'-O-methyl ribonucleotide
  modified_base 17: mod_base = OTHER; note = 2'-fluoro ribonucleotide
  modified_base 18..19: mod_base = OTHER; note = 2'-O-methyl ribonucleotide
  modified_base 20: mod_base = OTHER; note = inverted deoxythymidine
  modified_base 1..3: mod_base = OTHER; note = phosphorothioate linkage
  misc_feature 1..19: note = RNA
  misc_feature 20: note = DNA
ttgcggtgaaagcgaattat

SEQ ID NO: 61 - DNA, 20 bp, synthetic construct
  source 1..20: mol_type = other DNA
  modified_base 1..2: mod_base = OTHER; note = 2'-O-methyl ribonucleotide
  modified_base 3: mod_base = OTHER; note = 2'-fluoro ribonucleotide
  modified_base 4..6: mod_base = OTHER; note = 2'-O-methyl ribonucleotide
  modified_base 7..9: mod_base = OTHER; note = 2'-fluoro ribonucleotide
  modified_base 10..11: mod_base = OTHER; note = 2'-O-methyl ribonucleotide
  modified_base 12: mod_base = OTHER; note = 2'-fluoro ribonucleotide
  modified_base 13..16: mod_base = OTHER; note = 2'-O-methyl ribonucleotide
  modified_base 17: mod_base = OTHER; note = 2'-fluoro ribonucleotide
  modified_base 18..19: mod_base = OTHER; note = 2'-O-methyl ribonucleotide
  modified_base 20: mod_base = OTHER; note = inverted deoxythymidine
  modified_base 1..3: mod_base = OTHER; note = phosphorothioate linkage
  misc_feature 1..19: note = RNA
  misc_feature 20: note = DNA
tgcggtgaaagcgaattcat

SEQ ID NO: 62 - DNA, 20 bp, synthetic construct
  source 1..20: mol_type = other DNA
  modified_base 1..2: mod_base = OTHER; note = 2'-O-methyl ribonucleotide
  modified_base 3: mod_base = OTHER; note = 2'-fluoro ribonucleotide
  modified_base 4..6: mod_base = OTHER; note = 2'-O-methyl ribonucleotide
  modified_base 7..9: mod_base = OTHER; note = 2'-fluoro ribonucleotide
  modified_base 10..11: mod_base = OTHER; note = 2'-O-methyl ribonucleotide
  modified_base 12: mod_base = OTHER; note = 2'-fluoro ribonucleotide
  modified_base 13..16: mod_base = OTHER; note = 2'-O-methyl ribonucleotide
  modified_base 17: mod_base = OTHER; note = 2'-fluoro ribonucleotide
  modified_base 18..19: mod_base = OTHER; note = 2'-O-methyl ribonucleotide
  modified_base 20: mod_base = OTHER; note = inverted deoxythymidine
  modified_base 1..3: mod_base = OTHER; note = phosphorothioate linkage
  misc_feature 1..19: note = RNA
  misc_feature 20: note = DNA
cggtgaaagcgaattcctat

SEQ ID NO: 63 - DNA, 20 bp, synthetic construct
  source 1..20: mol_type = other DNA
  modified_base 1..2: mod_base = OTHER; note = 2'-O-methyl ribonucleotide
  modified_base 3: mod_base = OTHER; note = 2'-fluoro ribonucleotide
  modified_base 4..6: mod_base = OTHER; note = 2'-O-methyl ribonucleotide
  modified_base 7..9: mod_base = OTHER; note = 2'-fluoro ribonucleotide
  modified_base 10..11: mod_base = OTHER; note = 2'-O-methyl ribonucleotide
  modified_base 12: mod_base = OTHER; note = 2'-fluoro ribonucleotide
  modified_base 13..16: mod_base = OTHER; note = 2'-O-methyl ribonucleotide
  modified_base 17: mod_base = OTHER; note = 2'-fluoro ribonucleotide
  modified_base 18..19: mod_base = OTHER; note = 2'-O-methyl ribonucleotide
  modified_base 20: mod_base = OTHER; note = inverted deoxythymidine
  modified_base 1..3: mod_base = OTHER; note = phosphorothioate linkage
  misc_feature 1..19: note = RNA
  misc_feature 20: note = DNA
ggtgaaagcgaattcctaat

SEQ ID NO: 64 - DNA, 20 bp, synthetic construct
  source 1..20: mol_type = other DNA
  modified_base 1..2: mod_base = OTHER; note = 2'-O-methyl ribonucleotide
  modified_base 3: mod_base = OTHER; note = 2'-fluoro ribonucleotide
  modified_base 4..6: mod_base = OTHER; note = 2'-O-methyl ribonucleotide
  modified_base 7..9: mod_base = OTHER; note = 2'-fluoro ribonucleotide
  modified_base 10..11: mod_base = OTHER; note = 2'-O-methyl ribonucleotide
  modified_base 12: mod_base = OTHER; note = 2'-fluoro ribonucleotide
  modified_base 13..16: mod_base = OTHER; note = 2'-O-methyl ribonucleotide
  modified_base 17: mod_base = OTHER; note = 2'-fluoro ribonucleotide
  modified_base 18..19: mod_base = OTHER; note = 2'-O-methyl ribonucleotide
  modified_base 20: mod_base = OTHER; note = inverted deoxythymidine
  modified_base 1..3: mod_base = OTHER; note = phosphorothioate linkage
  misc_feature 1..19: note = RNA
  misc_feature 20: note = DNA
tgaaagcgaattcctagaat

SEQ ID NO: 65 - DNA, 20 bp, synthetic construct
  source 1..20: mol_type = other DNA
  modified_base 1..2: mod_base = OTHER; note = 2'-O-methyl ribonucleotide
  modified_base 3: mod_base = OTHER; note = 2'-fluoro ribonucleotide
  modified_base 4..6: mod_base = OTHER; note = 2'-O-methyl ribonucleotide
  modified_base 7..9: mod_base = OTHER; note = 2'-fluoro ribonucleotide
  modified_base 10..11: mod_base = OTHER; note = 2'-O-methyl ribonucleotide
  modified_base 12: mod_base = OTHER; note = 2'-fluoro ribonucleotide
  modified_base 13..16: mod_base = OTHER; note = 2'-O-methyl ribonucleotide
  modified_base 17: mod_base = OTHER; note = 2'-fluoro ribonucleotide
  modified_base 18..19: mod_base = OTHER; note = 2'-O-methyl ribonucleotide
  modified_base 20: mod_base = OTHER; note = inverted deoxythymidine
  modified_base 1..3: mod_base = OTHER; note = phosphorothioate linkage
  misc_feature 1..19: note = RNA
  misc_feature 20: note = DNA
gaaagcgaattcctagacat

SEQ ID NO: 66 - DNA, 20 bp, synthetic construct
  source 1..20: mol_type = other DNA
  modified_base 1..2: mod_base = OTHER; note = 2'-O-methyl ribonucleotide
  modified_base 3: mod_base = OTHER; note = 2'-fluoro ribonucleotide
  modified_base 4..6: mod_base = OTHER; note = 2'-O-methyl ribonucleotide
  modified_base 7..9: mod_base = OTHER; note = 2'-fluoro ribonucleotide
  modified_base 10..11: mod_base = OTHER; note = 2'-O-methyl ribonucleotide
  modified_base 12: mod_base = OTHER; note = 2'-fluoro ribonucleotide
  modified_base 13..16: mod_base = OTHER; note = 2'-O-methyl ribonucleotide
  modified_base 17: mod_base = OTHER; note = 2'-fluoro ribonucleotide
  modified_base 18..19: mod_base = OTHER; note = 2'-O-methyl ribonucleotide
  modified_base 20: mod_base = OTHER; note = inverted deoxythymidine
  modified_base 1..3: mod_base = OTHER; note = phosphorothioate linkage
  misc_feature 1..19: note = RNA
  misc_feature 20: note = DNA
aaagcgaattcctagacaat

SEQ ID NO: 67 - DNA, 20 bp, synthetic construct
  source 1..20: mol_type = other DNA
  modified_base 1..2: mod_base = OTHER; note = 2'-O-methyl ribonucleotide
  modified_base 3: mod_base = OTHER; note = 2'-fluoro ribonucleotide
  modified_base 4..6: mod_base = OTHER; note = 2'-O-methyl ribonucleotide
  modified_base 7..9: mod_base = OTHER; note = 2'-fluoro ribonucleotide
  modified_base 10..11: mod_base = OTHER; note = 2'-O-methyl ribonucleotide
  modified_base 12: mod_base = OTHER; note = 2'-fluoro ribonucleotide
  modified_base 13..16: mod_base = OTHER; note = 2'-O-methyl ribonucleotide
  modified_base 17: mod_base = OTHER; note = 2'-fluoro ribonucleotide
  modified_base 18..19: mod_base = OTHER; note = 2'-O-methyl ribonucleotide
  modified_base 20: mod_base = OTHER; note = inverted deoxythymidine
  modified_base 1..3: mod_base = OTHER; note = phosphorothioate linkage
  misc_feature 1..19: note = RNA
  misc_feature 20: note = DNA
aagcgaattcctagacacat

SEQ ID NO: 68 - DNA, 20 bp, synthetic construct
  source 1..20: mol_type = other DNA
  modified_base 1..2: mod_base = OTHER; note = 2'-O-methyl ribonucleotide
  modified_base 3: mod_base = OTHER; note = 2'-fluoro ribonucleotide
  modified_base 4..6: mod_base = OTHER; note = 2'-O-methyl ribonucleotide
  modified_base 7..9: mod_base = OTHER; note = 2'-fluoro ribonucleotide
  modified_base 10..11: mod_base = OTHER; note = 2'-O-methyl ribonucleotide
  modified_base 12: mod_base = OTHER; note = 2'-fluoro ribonucleotide
  modified_base 13..16: mod_base = OTHER; note = 2'-O-methyl ribonucleotide
  modified_base 17: mod_base = OTHER; note = 2'-fluoro ribonucleotide
  modified_base 18..19: mod_base = OTHER; note = 2'-O-methyl ribonucleotide
  modified_base 20: mod_base = OTHER; note = inverted deoxythymidine
  modified_base 1..3: mod_base = OTHER; note = phosphorothioate linkage
  misc_feature 1..19: note = RNA
  misc_feature 20: note = DNA
agcgaattcctagacaccat

SEQ ID NO: 69 - DNA, 20 bp, synthetic construct
  source 1..20: mol_type = other DNA
  modified_base 1..2: mod_base = OTHER; note = 2'-O-methyl ribonucleotide
  modified_base 3: mod_base = OTHER; note = 2'-fluoro ribonucleotide
  modified_base 4..6: mod_base = OTHER; note = 2'-O-methyl ribonucleotide
  modified_base 7..9: mod_base = OTHER; note = 2'-fluoro ribonucleotide
  modified_base 10..11: mod_base = OTHER; note = 2'-O-methyl ribonucleotide
  modified_base 12: mod_base = OTHER; note = 2'-fluoro ribonucleotide
  modified_base 13..16: mod_base = OTHER; note = 2'-O-methyl ribonucleotide
  modified_base 17: mod_base = OTHER; note = 2'-fluoro ribonucleotide
  modified_base 18..19: mod_base = OTHER; note = 2'-O-methyl ribonucleotide
  modified_base 20: mod_base = OTHER; note = inverted deoxythymidine
  modified_base 1..3: mod_base = OTHER; note = phosphorothioate linkage
  misc_feature 1..19: note = RNA
  misc_feature 20: note = DNA
ctagacacctggaacagaat

SEQ ID NO: 70 - DNA, 20 bp, synthetic construct
  source 1..20: mol_type = other DNA
  modified_base 1..2: mod_base = OTHER; note = 2'-O-methyl ribonucleotide
  modified_base 3: mod_base = OTHER; note = 2'-fluoro ribonucleotide
  modified_base 4..6: mod_base = OTHER; note = 2'-O-methyl ribonucleotide
  modified_base 7..9: mod_base = OTHER; note = 2'-fluoro ribonucleotide
  modified_base 10..11: mod_base = OTHER; note = 2'-O-methyl ribonucleotide
  modified_base 12: mod_base = OTHER; note = 2'-fluoro ribonucleotide
  modified_base 13..16: mod_base = OTHER; note = 2'-O-methyl ribonucleotide
  modified_base 17: mod_base = OTHER; note = 2'-fluoro ribonucleotide
  modified_base 18..19: mod_base = OTHER; note = 2'-O-methyl ribonucleotide
  modified_base 20: mod_base = OTHER; note = inverted deoxythymidine
  modified_base 1..3: mod_base = OTHER; note = phosphorothioate linkage
  misc_feature 1..19: note = RNA
  misc_feature 20: note = DNA
cagcacaaatactgcgacat

SEQ ID NO: 71 - DNA, 20 bp, synthetic construct
  source 1..20: mol_type = other DNA
  modified_base 1..2: mod_base = OTHER; note = 2'-O-methyl ribonucleotide
  modified_base 3: mod_base = OTHER; note = 2'-fluoro ribonucleotide
  modified_base 4..6: mod_base = OTHER; note = 2'-O-methyl ribonucleotide
  modified_base 7..9: mod_base = OTHER; note = 2'-fluoro ribonucleotide
  modified_base 10..11: mod_base = OTHER; note = 2'-O-methyl ribonucleotide
  modified_base 12: mod_base = OTHER; note = 2'-fluoro ribonucleotide
  modified_base 13..16: mod_base = OTHER; note = 2'-O-methyl ribonucleotide
  modified_base 17: mod_base = OTHER; note = 2'-fluoro ribonucleotide
  modified_base 18..19: mod_base = OTHER; note = 2'-O-methyl ribonucleotide
  modified_base 20: mod_base = OTHER; note = inverted deoxythymidine
  modified_base 1..3: mod_base = OTHER; note = phosphorothioate linkage
  misc_feature 1..19: note = RNA
  misc_feature 20: note = DNA
agcacaaatactgcgaccat

SEQ ID NO: 72 - DNA, 20 bp, synthetic construct
  source 1..20: mol_type = other DNA
  modified_base 1..2: mod_base = OTHER; note = 2'-O-methyl ribonucleotide
  modified_base 3: mod_base = OTHER; note = 2'-fluoro ribonucleotide
  modified_base 4..6: mod_base = OTHER; note = 2'-O-methyl ribonucleotide
  modified_base 7..9: mod_base = OTHER; note = 2'-fluoro ribonucleotide
  modified_base 10..11: mod_base = OTHER; note = 2'-O-methyl ribonucleotide
  modified_base 12: mod_base = OTHER; note = 2'-fluoro ribonucleotide
  modified_base 13..16: mod_base = OTHER; note = 2'-O-methyl ribonucleotide
  modified_base 17: mod_base = OTHER; note = 2'-fluoro ribonucleotide
  modified_base 18..19: mod_base = OTHER; note = 2'-O-methyl ribonucleotide
  modified_base 20: mod_base = OTHER; note = inverted deoxythymidine
  modified_base 1..3: mod_base = OTHER; note = phosphorothioate linkage
  misc_feature 1..19: note = RNA
  misc_feature 20: note = DNA
gcacaaatactgcgacccat

SEQ ID NO: 73 - DNA, 20 bp, synthetic construct
  source 1..20: mol_type = other DNA
  modified_base 1..2: mod_base = OTHER; note = 2'-O-methyl ribonucleotide
  modified_base 3: mod_base = OTHER; note = 2'-fluoro ribonucleotide
  modified_base 4..6: mod_base = OTHER; note = 2'-O-methyl ribonucleotide
  modified_base 7..9: mod_base = OTHER; note = 2'-fluoro ribonucleotide
  modified_base 10..11: mod_base = OTHER; note = 2'-O-methyl ribonucleotide
  modified_base 12: mod_base = OTHER; note = 2'-fluoro ribonucleotide
  modified_base 13..16: mod_base = OTHER; note = 2'-O-methyl ribonucleotide
  modified_base 17: mod_base = OTHER; note = 2'-fluoro ribonucleotide
  modified_base 18..19: mod_base = OTHER; note = 2'-O-methyl ribonucleotide
  modified_base 20: mod_base = OTHER; note = inverted deoxythymidine
  modified_base 1..3: mod_base = OTHER; note = phosphorothioate linkage
  misc_feature 1..19: note = RNA
  misc_feature 20: note = DNA
tactgcgaccccaacctaat

SEQ ID NO: 74 - DNA, 20 bp, synthetic construct
  source 1..20: mol_type = other DNA
  modified_base 1..2: mod_base = OTHER; note = 2'-O-methyl ribonucleotide
  modified_base 3: mod_base = OTHER; note = 2'-fluoro ribonucleotide
  modified_base 4..6: mod_base = OTHER; note = 2'-O-methyl ribonucleotide
  modified_base 7..9: mod_base = OTHER; note = 2'-fluoro ribonucleotide
  modified_base 10..11: mod_base = OTHER; note = 2'-O-methyl ribonucleotide
  modified_base 12: mod_base = OTHER; note = 2'-fluoro ribonucleotide
  modified_base 13..16: mod_base = OTHER; note = 2'-O-methyl ribonucleotide
  modified_base 17: mod_base = OTHER; note = 2'-fluoro ribonucleotide
  modified_base 18..19: mod_base = OTHER; note = 2'-O-methyl ribonucleotide
  modified_base 20: mod_base = OTHER; note = inverted deoxythymidine
  modified_base 1..3: mod_base = OTHER; note = phosphorothioate linkage
  misc_feature 1..19: note = RNA
  misc_feature 20: note = DNA
actgcgaccccaacctagat

SEQ ID NO: 75 - DNA, 20 bp, synthetic construct
  source 1..20: mol_type = other DNA
  modified_base 1..2: mod_base = OTHER; note = 2'-O-methyl ribonucleotide
  modified_base 3: mod_base = OTHER; note = 2'-fluoro ribonucleotide
  modified_base 4..6: mod_base = OTHER; note = 2'-O-methyl ribonucleotide
  modified_base 7..9: mod_base = OTHER; note = 2'-fluoro ribonucleotide
  modified_base 10..11: mod_base = OTHER; note = 2'-O-methyl ribonucleotide
  modified_base 12: mod_base = OTHER; note = 2'-fluoro ribonucleotide
  modified_base 13..16: mod_base = OTHER; note = 2'-O-methyl ribonucleotide
  modified_base 17: mod_base = OTHER; note = 2'-fluoro ribonucleotide
  modified_base 18..19: mod_base = OTHER; note = 2'-O-methyl ribonucleotide
  modified_base 20: mod_base = OTHER; note = inverted deoxythymidine
  modified_base 1..3: mod_base = OTHER; note = phosphorothioate linkage
  misc_feature 1..19: note = RNA
  misc_feature 20: note = DNA
ctgcgaccccaacctaggat

SEQ ID NO: 76 - DNA, 20 bp, synthetic construct
  source 1..20: mol_type = other DNA
  modified_base 1..2: mod_base = OTHER; note = 2'-O-methyl ribonucleotide
  modified_base 3: mod_base = OTHER; note = 2'-fluoro ribonucleotide
  modified_base 4..6: mod_base = OTHER; note = 2'-O-methyl ribonucleotide
  modified_base 7..9: mod_base = OTHER; note = 2'-fluoro ribonucleotide
  modified_base 10..11: mod_base = OTHER; note = 2'-O-methyl ribonucleotide
  modified_base 12: mod_base = OTHER; note = 2'-fluoro ribonucleotide
  modified_base 13..16: mod_base = OTHER; note = 2'-O-methyl ribonucleotide
  modified_base 17: mod_base = OTHER; note = 2'-fluoro ribonucleotide
  modified_base 18..19: mod_base = OTHER; note = 2'-O-methyl ribonucleotide
  modified_base 20: mod_base = OTHER; note = inverted deoxythymidine
  modified_base 1..3: mod_base = OTHER; note = phosphorothioate linkage
  misc_feature 1..19: note = RNA
  misc_feature 20: note = DNA
gaccccaacctagggcttat

SEQ ID NO: 77 - DNA, 20 bp, synthetic construct
  source 1..20: mol_type = other DNA
  modified_base 1..2: mod_base = OTHER; note = 2'-O-methyl ribonucleotide
  modified_base 3: mod_base = OTHER; note = 2'-fluoro ribonucleotide
  modified_base 4..6: mod_base = OTHER; note = 2'-O-methyl ribonucleotide
  modified_base 7..9: mod_base = OTHER; note = 2'-fluoro ribonucleotide
  modified_base 10..11: mod_base = OTHER; note = 2'-O-methyl ribonucleotide
  modified_base 12: mod_base = OTHER; note = 2'-fluoro ribonucleotide
  modified_base 13..16: mod_base = OTHER; note = 2'-O-methyl ribonucleotide
  modified_base 17: mod_base = OTHER; note = 2'-fluoro ribonucleotide
  modified_base 18..19: mod_base = OTHER; note = 2'-O-methyl ribonucleotide
  modified_base 20: mod_base = OTHER; note = inverted deoxythymidine
  modified_base 1..3: mod_base = OTHER; note = phosphorothioate linkage
  misc_feature 1..19: note = RNA
  misc_feature 20: note = DNA
accccaacctagggcttcat

SEQ ID NO: 78 - DNA, 20 bp, synthetic construct
  source 1..20: mol_type = other DNA
  modified_base 1..2: mod_base = OTHER; note = 2'-O-methyl ribonucleotide
  modified_base 3: mod_base = OTHER; note = 2'-fluoro ribonucleotide
  modified_base 4..6: mod_base = OTHER; note = 2'-O-methyl ribonucleotide
  modified_base 7..9: mod_base = OTHER; note = 2'-fluoro ribonucleotide
  modified_base 10..11: mod_base = OTHER; note = 2'-O-methyl ribonucleotide
  modified_base 12: mod_base = OTHER; note = 2'-fluoro ribonucleotide
  modified_base 13..16: mod_base = OTHER; note = 2'-O-methyl ribonucleotide
  modified_base 17: mod_base = OTHER; note = 2'-fluoro ribonucleotide
  modified_base 18..19: mod_base = OTHER; note = 2'-O-methyl ribonucleotide
  modified_base 20: mod_base = OTHER; note = inverted deoxythymidine
  modified_base 1..3: mod_base = OTHER; note = phosphorothioate linkage
  misc_feature 1..19: note = RNA
  misc_feature 20: note = DNA
ccccaacctagggcttcgat

SEQ ID NO: 79 - DNA, 20 bp, synthetic construct
  source 1..20: mol_type = other DNA
  modified_base 1..2: mod_base = OTHER; note = 2'-O-methyl ribonucleotide
  modified_base 3: mod_base = OTHER; note = 2'-fluoro ribonucleotide
  modified_base 4..6: mod_base = OTHER; note = 2'-O-methyl ribonucleotide
  modified_base 7..9: mod_base = OTHER; note = 2'-fluoro ribonucleotide
  modified_base 10..11: mod_base = OTHER; note = 2'-O-methyl ribonucleotide
  modified_base 12: mod_base = OTHER; note = 2'-fluoro ribonucleotide
  modified_base 13..16: mod_base = OTHER; note = 2'-O-methyl ribonucleotide
  modified_base 17: mod_base = OTHER; note = 2'-fluoro ribonucleotide
  modified_base 18..19: mod_base = OTHER; note = 2'-O-methyl ribonucleotide
  modified_base 20: mod_base = OTHER; note = inverted deoxythymidine
  modified_base 1..3: mod_base = OTHER; note = phosphorothioate linkage
  misc_feature 1..19: note = RNA
  misc_feature 20: note = DNA
cctagggcttcgggtccaat

SEQ ID NO: 80 - DNA, 20 bp, synthetic construct
  source 1..20: mol_type = other DNA
  modified_base 1..2: mod_base = OTHER; note = 2'-O-methyl ribonucleotide
  modified_base 3: mod_base = OTHER; note = 2'-fluoro ribonucleotide
  modified_base 4..6: mod_base = OTHER; note = 2'-O-methyl ribonucleotide
  modified_base 7..9: mod_base = OTHER; note = 2'-fluoro ribonucleotide
  modified_base 10..11: mod_base = OTHER; note = 2'-O-methyl ribonucleotide
  modified_base 12: mod_base = OTHER; note = 2'-fluoro ribonucleotide
  modified_base 13..16: mod_base = OTHER; note = 2'-O-methyl ribonucleotide
  modified_base 17: mod_base = OTHER; note = 2'-fluoro ribonucleotide
  modified_base 18..19: mod_base = OTHER; note = 2'-O-methyl ribonucleotide
  modified_base 20: mod_base = OTHER; note = inverted deoxythymidine
  modified_base 1..3: mod_base = OTHER; note = phosphorothioate linkage
  misc_feature 1..19: note = RNA
  misc_feature 20: note = DNA
tcgggtccagcagaagggat

SEQ ID NO: 81 - DNA, 20 bp, synthetic construct
  source 1..20: mol_type = other DNA
  modified_base 1..2: mod_base = OTHER; note = 2'-O-methyl ribonucleotide
  modified_base 3: mod_base = OTHER; note = 2'-fluoro ribonucleotide
  modified_base 4..6: mod_base = OTHER; note = 2'-O-methyl ribonucleotide
  modified_base 7..9: mod_base = OTHER; note = 2'-fluoro ribonucleotide
  modified_base 10..11: mod_base = OTHER; note = 2'-O-methyl ribonucleotide
  modified_base 12: mod_base = OTHER; note = 2'-fluoro ribonucleotide
  modified_base 13..16: mod_base = OTHER; note = 2'-O-methyl ribonucleotide
  modified_base 17: mod_base = OTHER; note = 2'-fluoro ribonucleotide
  modified_base 18..19: mod_base = OTHER; note = 2'-O-methyl ribonucleotide
  modified_base 20: mod_base = OTHER; note = inverted deoxythymidine
  modified_base 1..3: mod_base = OTHER; note = phosphorothioate linkage
  misc_feature 1..19: note = RNA
  misc_feature 20: note = DNA
gaaggctggcactgtacgat

SEQ ID NO: 82 - DNA, 20 bp, synthetic construct
  source 1..20: mol_type = other DNA
  modified_base 1..2: mod_base = OTHER; note = 2'-O-methyl ribonucleotide
  modified_base 3: mod_base = OTHER; note = 2'-fluoro ribonucleotide
  modified_base 4..6: mod_base = OTHER; note = 2'-O-methyl ribonucleotide
  modified_base 7..9: mod_base = OTHER; note = 2'-fluoro ribonucleotide
  modified_base 10..11: mod_base = OTHER; note = 2'-O-methyl ribonucleotide
  modified_base 12: mod_base = OTHER; note = 2'-fluoro ribonucleotide
  modified_base 13..16: mod_base = OTHER; note = 2'-O-methyl ribonucleotide
  modified_base 17: mod_base = OTHER; note = 2'-fluoro ribonucleotide
  modified_base 18..19: mod_base = OTHER; note = 2'-O-methyl ribonucleotide
  modified_base 20: mod_base = OTHER; note = inverted deoxythymidine
  modified_base 1..3: mod_base = OTHER; note = phosphorothioate linkage
  misc_feature 1..19: note = RNA
  misc_feature 20: note = DNA
ggcactgtacgagtgaggat

SEQ ID NO: 83 - DNA, 20 bp, synthetic construct
  source 1..20: mol_type = other DNA
  modified_base 1..2: mod_base = OTHER; note = 2'-O-methyl ribonucleotide
  modified_base 3: mod_base = OTHER; note = 2'-fluoro ribonucleotide
  modified_base 4..6: mod_base = OTHER; note = 2'-O-methyl ribonucleotide
  modified_base 7..9: mod_base = OTHER; note = 2'-fluoro ribonucleotide
  modified_base 10..11: mod_base = OTHER; note = 2'-O-methyl ribonucleotide
  modified_base 12: mod_base = OTHER; note = 2'-fluoro ribonucleotide
  modified_base 13..16: mod_base = OTHER; note = 2'-O-methyl ribonucleotide
  modified_base 17: mod_base = OTHER; note = 2'-fluoro ribonucleotide
  modified_base 18..19: mod_base = OTHER; note = 2'-O-methyl ribonucleotide
  modified_base 20: mod_base = OTHER; note = inverted deoxythymidine
  modified_base 1..3: mod_base = OTHER; note = phosphorothioate linkage
  misc_feature 1..19: note = RNA
  misc_feature 20: note = DNA
gtacgagtgaggcctgtgat

SEQ ID NO: 84 - DNA, 20 bp, synthetic construct
  source 1..20: mol_type = other DNA
  modified_base 1..2: mod_base = OTHER; note = 2'-O-methyl ribonucleotide
  modified_base 3: mod_base = OTHER; note = 2'-fluoro ribonucleotide
  modified_base 4..6: mod_base = OTHER; note = 2'-O-methyl ribonucleotide
  modified_base 7..9: mod_base = OTHER; note = 2'-fluoro ribonucleotide
  modified_base 10..11: mod_base = OTHER; note = 2'-O-methyl ribonucleotide
  modified_base 12: mod_base = OTHER; note = 2'-fluoro ribonucleotide
  modified_base 13..16: mod_base = OTHER; note = 2'-O-methyl ribonucleotide
  modified_base 17: mod_base = OTHER; note = 2'-fluoro ribonucleotide
  modified_base 18..19: mod_base = OTHER; note = 2'-O-methyl ribonucleotide
  modified_base 20: mod_base = OTHER; note = inverted deoxythymidine
  modified_base 1..3: mod_base = OTHER; note = phosphorothioate linkage
  misc_feature 1..19: note = RNA
  misc_feature 20: note = DNA
tgtcctgcaccgctcatgat

SEQ ID NO: 85 - DNA, 20 bp, synthetic construct
  source 1..20: mol_type = other DNA
  modified_base 1..2: mod_base = OTHER; note = 2'-O-methyl ribonucleotide
  modified_base 3: mod_base = OTHER; note = 2'-fluoro ribonucleotide
  modified_base 4..6: mod_base = OTHER; note = 2'-O-methyl ribonucleotide
  modified_base 7..9: mod_base = OTHER; note = 2'-fluoro ribonucleotide
  modified_base 10..11: mod_base = OTHER; note = 2'-O-methyl ribonucleotide
  modified_base 12: mod_base = OTHER; note = 2'-fluoro ribonucleotide
  modified_base 13..16: mod_base = OTHER; note = 2'-O-methyl ribonucleotide
  modified_base 17: mod_base = OTHER; note = 2'-fluoro ribonucleotide
  modified_base 18..19: mod_base = OTHER; note = 2'-O-methyl ribonucleotide
  modified_base 20: mod_base = OTHER; note = inverted deoxythymidine
  modified_base 1..3: mod_base = OTHER; note = phosphorothioate linkage
  misc_feature 1..19: note = RNA
  misc_feature 20: note = DNA
tgcaccgctcatgctcgcat

SEQ ID NO: 86 - DNA, 20 bp, synthetic construct
  source 1..20: mol_type = other DNA
  modified_base 1..2: mod_base = OTHER; note = 2'-O-methyl ribonucleotide
  modified_base 3: mod_base = OTHER; note = 2'-fluoro ribonucleotide
  modified_base 4..6: mod_base = OTHER; note = 2'-O-methyl ribonucleotide
  modified_base 7..9: mod_base = OTHER; note = 2'-fluoro ribonucleotide
  modified_base 10..11: mod_base = OTHER; note = 2'-O-methyl ribonucleotide
  modified_base 12: mod_base = OTHER; note = 2'-fluoro ribonucleotide
  modified_base 13..16: mod_base = OTHER; note = 2'-O-methyl ribonucleotide
  modified_base 17: mod_base = OTHER; note = 2'-fluoro ribonucleotide
  modified_base 18..19: mod_base = OTHER; note = 2'-O-methyl ribonucleotide
  modified_base 20: mod_base = OTHER; note = inverted deoxythymidine
  modified_base 1..3: mod_base = OTHER; note = phosphorothioate linkage
  misc_feature 1..19: note = RNA
  misc_feature 20: note = DNA
gcaccgctcatgctcgccat

SEQ ID NO: 87 - DNA, 20 bp, synthetic construct
  source 1..20: mol_type = other DNA
  modified_base 1..2: mod_base = OTHER; note = 2'-O-methyl ribonucleotide
  modified_base 3: mod_base = OTHER; note = 2'-fluoro ribonucleotide
  modified_base 4..6: mod_base = OTHER; note = 2'-O-methyl ribonucleotide
  modified_base 7..9: mod_base = OTHER; note = 2'-fluoro ribonucleotide
  modified_base 10..11: mod_base = OTHER; note = 2'-O-methyl ribonucleotide
  modified_base 12: mod_base = OTHER; note = 2'-fluoro ribonucleotide
  modified_base 13..16: mod_base = OTHER; note = 2'-O-methyl ribonucleotide
  modified_base 17: mod_base = OTHER; note = 2'-fluoro ribonucleotide
  modified_base 18..19: mod_base = OTHER; note = 2'-O-methyl ribonucleotide
  modified_base 20: mod_base = OTHER; note = inverted deoxythymidine
  modified_base 1..3: mod_base = OTHER; note = phosphorothioate linkage
  misc_feature 1..19: note = RNA
  misc_feature 20: note = DNA
ccgctcatgctcgcccggat

SEQ ID NO: 88 - DNA, 20 bp, synthetic construct
  source 1..20: mol_type = other DNA
  modified_base 1..2: mod_base = OTHER; note = 2'-O-methyl ribonucleotide
  modified_base 3: mod_base = OTHER; note = 2'-fluoro ribonucleotide
  modified_base 4..6: mod_base = OTHER; note = 2'-O-methyl ribonucleotide
  modified_base 7..9: mod_base = OTHER; note = 2'-fluoro ribonucleotide
  modified_base 10..11: mod_base = OTHER; note = 2'-O-methyl ribonucleotide
  modified_base 12: mod_base = OTHER; note = 2'-fluoro ribonucleotide
  modified_base 13..16: mod_base = OTHER; note = 2'-O-methyl ribonucleotide
  modified_base 17: mod_base = OTHER; note = 2'-fluoro ribonucleotide
  modified_base 18..19: mod_base = OTHER; note = 2'-O-methyl ribonucleotide
  modified_base 20: mod_base = OTHER; note = inverted deoxythymidine
  modified_base 1..3: mod_base = OTHER; note = phosphorothioate linkage
  misc_feature 1..19: note = RNA
  misc_feature 20: note = DNA
cccggctttggggtcaagat

SEQ ID NO: 89 - DNA, 20 bp, synthetic construct
  source 1..20: mol_type = other DNA
  modified_base 1..2: mod_base = OTHER; note = 2'-O-methyl ribonucleotide
  modified_base 3: mod_base = OTHER; note = 2'-fluoro ribonucleotide
  modified_base 4..6: mod_base = OTHER; note = 2'-O-methyl ribonucleotide
  modified_base 7..9: mod_base = OTHER; note = 2'-fluoro ribonucleotide
  modified_base 10..11: mod_base = OTHER; note = 2'-O-methyl ribonucleotide
  modified_base 12: mod_base = OTHER; note = 2'-fluoro ribonucleotide
  modified_base 13..16: mod_base = OTHER; note = 2'-O-methyl ribonucleotide
  modified_base 17: mod_base = OTHER; note = 2'-fluoro ribonucleotide
  modified_base 18..19: mod_base = OTHER; note = 2'-O-methyl ribonucleotide
  modified_base 20: mod_base = OTHER; note = inverted deoxythymidine
  modified_base 1..3: mod_base = OTHER; note = phosphorothioate linkage
  misc_feature 1..19: note = RNA
  misc_feature 20: note = DNA
ctgataccatctgcgagcat

SEQ ID NO: 90 - DNA, 20 bp, synthetic construct
  source 1..20: mol_type = other DNA
  modified_base 1..2: mod_base = OTHER; note = 2'-O-methyl ribonucleotide
  modified_base 3: mod_base = OTHER; note = 2'-fluoro ribonucleotide
  modified_base 4..6: mod_base = OTHER; note = 2'-O-methyl ribonucleotide
  modified_base 7..9: mod_base = OTHER; note = 2'-fluoro ribonucleotide
  modified_base 10..11: mod_base = OTHER; note = 2'-O-methyl ribonucleotide
  modified_base 12: mod_base = OTHER; note = 2'-fluoro ribonucleotide
  modified_base 13..16: mod_base = OTHER; note = 2'-O-methyl ribonucleotide
  modified_base 17: mod_base = OTHER; note = 2'-fluoro ribonucleotide
  modified_base 18..19: mod_base = OTHER; note = 2'-O-methyl ribonucleotide
  modified_base 20: mod_base = OTHER; note = inverted deoxythymidine
  modified_base 1..3: mod_base = OTHER; note = phosphorothioate linkage
  misc_feature 1..19: note = RNA
  misc_feature 20: note = DNA
tgataccatctgcgagccat

SEQ ID NO: 91 - DNA, 20 bp, synthetic construct
  source 1..20: mol_type = other DNA
  modified_base 1..2: mod_base = OTHER; note = 2'-O-methyl ribonucleotide
  modified_base 3: mod_base = OTHER; note = 2'-fluoro ribonucleotide
  modified_base 4..6: mod_base = OTHER; note = 2'-O-methyl ribonucleotide
  modified_base 7..9: mod_base = OTHER; note = 2'-fluoro ribonucleotide
  modified_base 10..11: mod_base = OTHER; note = 2'-O-methyl ribonucleotide
  modified_base 12: mod_base = OTHER; note = 2'-fluoro ribonucleotide
  modified_base 13..16: mod_base = OTHER; note = 2'-O-methyl ribonucleotide
  modified_base 17: mod_base = OTHER; note = 2'-fluoro ribonucleotide
  modified_base 18..19: mod_base = OTHER; note = 2'-O-methyl ribonucleotide
  modified_base 20: mod_base = OTHER; note = inverted deoxythymidine
  modified_base 1..3: mod_base = OTHER; note = phosphorothioate linkage
  misc_feature 1..19: note = RNA
  misc_feature 20: note = DNA
ctgcccagtcggcttcttat

SEQ ID NO: 92 - DNA, 20 bp, synthetic construct
  source 1..20: mol_type = other DNA
  modified_base 1..2: mod_base = OTHER; note = 2'-O-methyl ribonucleotide
  modified_base 3: mod_base = OTHER; note = 2'-fluoro ribonucleotide
  modified_base 4..6: mod_base = OTHER; note = 2'-O-methyl ribonucleotide
  modified_base 7..9: mod_base = OTHER; note = 2'-fluoro ribonucleotide
  modified_base 10..11: mod_base = OTHER; note = 2'-O-methyl ribonucleotide
  modified_base 12: mod_base = OTHER; note = 2'-fluoro ribonucleotide
  modified_base 13..16: mod_base = OTHER; note = 2'-O-methyl ribonucleotide
  modified_base 17: mod_base = OTHER; note = 2'-fluoro ribonucleotide
  modified_base 18..19: mod_base = OTHER; note = 2'-O-methyl ribonucleotide
  modified_base 20: mod_base = OTHER; note = inverted deoxythymidine
  modified_base 1..3: mod_base = OTHER; note = phosphorothioate linkage
  misc_feature 1..19: note = RNA
  misc_feature 20: note = DNA
gtgtcatctgctttcgaaat

SEQ ID NO: 93 - DNA, 20 bp, synthetic construct
  source 1..20: mol_type = other DNA
  modified_base 1..2: mod_base = OTHER; note = 2'-O-methyl ribonucleotide
  modified_base 3: mod_base = OTHER; note = 2'-fluoro ribonucleotide
  modified_base 4..6: mod_base = OTHER; note = 2'-O-methyl ribonucleotide
  modified_base 7..9: mod_base = OTHER; note = 2'-fluoro ribonucleotide
  modified_base 10..11: mod_base = OTHER; note = 2'-O-methyl ribonucleotide
  modified_base 12: mod_base = OTHER; note = 2'-fluoro ribonucleotide
  modified_base 13..16: mod_base = OTHER; note = 2'-O-methyl ribonucleotide
  modified_base 17: mod_base = OTHER; note = 2'-fluoro ribonucleotide
  modified_base 18..19: mod_base = OTHER; note = 2'-O-methyl ribonucleotide
  modified_base 20: mod_base = OTHER; note = inverted deoxythymidine
  modified_base 1..3: mod_base = OTHER; note = phosphorothioate linkage
  misc_feature 1..19: note = RNA
  misc_feature 20: note = DNA
tgtcatctgctttcgaaaat

SEQ ID NO: 94 - DNA, 20 bp, synthetic construct
  source 1..20: mol_type = other DNA
  modified_base 1..2: mod_base = OTHER; note = 2'-O-methyl ribonucleotide
  modified_base 3: mod_base = OTHER; note = 2'-fluoro ribonucleotide
  modified_base 4..6: mod_base = OTHER; note = 2'-O-methyl ribonucleotide
  modified_base 7..9: mod_base = OTHER; note = 2'-fluoro ribonucleotide
  modified_base 10..11: mod_base = OTHER; note = 2'-O-methyl ribonucleotide
  modified_base 12: mod_base = OTHER; note = 2'-fluoro ribonucleotide
  modified_base 13..16: mod_base = OTHER; note = 2'-O-methyl ribonucleotide
  modified_base 17: mod_base = OTHER; note = 2'-fluoro ribonucleotide
  modified_base 18..19: mod_base = OTHER; note = 2'-O-methyl ribonucleotide
  modified_base 20: mod_base = OTHER; note = inverted deoxythymidine
  modified_base 1..3: mod_base = OTHER; note = phosphorothioate linkage
  misc_feature 1..19: note = RNA
  misc_feature 20: note = DNA
tcatctgctttcgaaaaaat

SEQ ID NO: 95 - DNA, 20 bp, synthetic construct
  source 1..20: mol_type = other DNA
  modified_base 1..2: mod_base = OTHER; note = 2'-O-methyl ribonucleotide
  modified_base 3: mod_base = OTHER; note = 2'-fluoro ribonucleotide
  modified_base 4..6: mod_base = OTHER; note = 2'-O-methyl ribonucleotide
  modified_base 7..9: mod_base = OTHER; note = 2'-fluoro ribonucleotide
  modified_base 10..11: mod_base = OTHER; note = 2'-O-methyl ribonucleotide
  modified_base 12: mod_base = OTHER; note = 2'-fluoro ribonucleotide
  modified_base 13..16: mod_base = OTHER; note = 2'-O-methyl ribonucleotide
  modified_base 17: mod_base = OTHER; note = 2'-fluoro ribonucleotide
  modified_base 18..19: mod_base = OTHER; note = 2'-O-methyl ribonucleotide
  modified_base 20: mod_base = OTHER; note = inverted deoxythymidine
  modified_base 1..3: mod_base = OTHER; note = phosphorothioate linkage
  misc_feature 1..19: note = RNA
  misc_feature 20: note = DNA
ttcgaaaaatgtcaccctat

SEQ ID NO: 96 - DNA, 20 bp, synthetic construct
  source 1..20: mol_type = other DNA
  modified_base 1..2: mod_base = OTHER; note = 2'-O-methyl ribonucleotide
  modified_base 3: mod_base = OTHER; note = 2'-fluoro ribonucleotide
  modified_base 4..6: mod_base = OTHER; note = 2'-O-methyl ribonucleotide
  modified_base 7..9: mod_base = OTHER; note = 2'-fluoro ribonucleotide
  modified_base 10..11: mod_base = OTHER; note = 2'-O-methyl ribonucleotide
  modified_base 12: mod_base = OTHER; note = 2'-fluoro ribonucleotide
  modified_base 13..16: mod_base = OTHER; note = 2'-O-methyl ribonucleotide
  modified_base 17: mod_base = OTHER; note = 2'-fluoro ribonucleotide
  modified_base 18..19: mod_base = OTHER; note = 2'-O-methyl ribonucleotide
  modified_base 20: mod_base = OTHER; note = inverted deoxythymidine
  modified_base 1..3: mod_base = OTHER; note = phosphorothioate linkage
  misc_feature 1..19: note = RNA
  misc_feature 20: note = DNA
tcgaaaaatgtcacccttat

SEQ ID NO: 97 - DNA, 20 bp, synthetic construct
  source 1..20: mol_type = other DNA
  modified_base 1..2: mod_base = OTHER; note = 2'-O-methyl ribonucleotide
  modified_base 3: mod_base = OTHER; note = 2'-fluoro ribonucleotide
  modified_base 4..6: mod_base = OTHER; note = 2'-O-methyl ribonucleotide
  modified_base 7..9: mod_base = OTHER; note = 2'-fluoro ribonucleotide
  modified_base 10..11: mod_base = OTHER; note = 2'-O-methyl ribonucleotide
  modified_base 12: mod_base = OTHER; note = 2'-fluoro ribonucleotide
  modified_base 13..16: mod_base = OTHER; note = 2'-O-methyl ribonucleotide
  modified_base 17: mod_base = OTHER; note = 2'-fluoro ribonucleotide
  modified_base 18..19: mod_base = OTHER; note = 2'-O-methyl ribonucleotide
  modified_base 20: mod_base = OTHER; note = inverted deoxythymidine
  modified_base 1..3: mod_base = OTHER; note = phosphorothioate linkage
  misc_feature 1..19: note = RNA
  misc_feature 20: note = DNA
aaaatgtcacccttggacat

SEQ ID NO: 98 - DNA, 20 bp, synthetic construct
  source 1..20: mol_type = other DNA
  modified_base 1..2: mod_base = OTHER; note = 2'-O-methyl ribonucleotide
  modified_base 3: mod_base = OTHER; note = 2'-fluoro ribonucleotide
  modified_base 4..6: mod_base = OTHER; note = 2'-O-methyl ribonucleotide
  modified_base 7..9: mod_base = OTHER; note = 2'-fluoro ribonucleotide
  modified_base 10..11: mod_base = OTHER; note = 2'-O-methyl ribonucleotide
  modified_base 12: mod_base = OTHER; note = 2'-fluoro ribonucleotide
  modified_base 13..16: mod_base = OTHER; note = 2'-O-methyl ribonucleotide
  modified_base 17: mod_base = OTHER; note = 2'-fluoro ribonucleotide
  modified_base 18..19: mod_base = OTHER; note = 2'-O-methyl ribonucleotide
  modified_base 20: mod_base = OTHER; note = inverted deoxythymidine
  modified_base 1..3: mod_base = OTHER; note = phosphorothioate linkage
  misc_feature 1..19: note = RNA
  misc_feature 20: note = DNA
tgatccccatcatcttcgat

SEQ ID NO: 99 - DNA, 20 bp, synthetic construct
  source 1..20: mol_type = other DNA
  modified_base 1..2: mod_base = OTHER; note = 2'-O-methyl ribonucleotide
  modified_base 3: mod_base = OTHER; note = 2'-fluoro ribonucleotide
  modified_base 4..6: mod_base = OTHER; note = 2'-O-methyl ribonucleotide
  modified_base 7..9: mod_base = OTHER; note = 2'-fluoro ribonucleotide
  modified_base 10..11: mod_base = OTHER; note = 2'-O-methyl ribonucleotide
  modified_base 12: mod_base = OTHER; note = 2'-fluoro ribonucleotide
  modified_base 13..16: mod_base = OTHER; note = 2'-O-methyl ribonucleotide
  modified_base 17: mod_base = OTHER; note = 2'-fluoro ribonucleotide
  modified_base 18..19: mod_base = OTHER; note = 2'-O-methyl ribonucleotide
  modified_base 20: mod_base = OTHER; note = inverted deoxythymidine
  modified_base 1..3: mod_base = OTHER; note = phosphorothioate linkage
  misc_feature 1..19: note = RNA
  misc_feature 20: note = DNA
ccccatcatcttcgggatat

SEQ ID NO: 100 - DNA, 20 bp, synthetic construct
  source 1..20: mol_type = other DNA
  modified_base 1..2: mod_base = OTHER; note = 2'-O-methyl ribonucleotide
  modified_base 3: mod_base = OTHER; note = 2'-fluoro ribonucleotide
  modified_base 4..6: mod_base = OTHER; note = 2'-O-methyl ribonucleotide
  modified_base 7..9: mod_base = OTHER; note = 2'-fluoro ribonucleotide
  modified_base 10..11: mod_base = OTHER; note = 2'-O-methyl ribonucleotide
  modified_base 12: mod_base = OTHER; note = 2'-fluoro ribonucleotide
  modified_base 13..16: mod_base = OTHER; note = 2'-O-methyl ribonucleotide
  modified_base 17: mod_base = OTHER; note = 2'-fluoro ribonucleotide
  modified_base 18..19: mod_base = OTHER; note = 2'-O-methyl ribonucleotide
  modified_base 20: mod_base = OTHER; note = inverted deoxythymidine
  modified_base 1..3: mod_base = OTHER; note = phosphorothioate linkage
  misc_feature 1..19: note = RNA
  misc_feature 20: note = DNA
atcttcgggatcctgtttat

SEQ ID NO: 101 - DNA, 20 bp, synthetic construct
  source 1..20: mol_type = other DNA
  modified_base 1..2: mod_base = OTHER; note = 2'-O-methyl ribonucleotide
  modified_base 3: mod_base = OTHER; note = 2'-fluoro ribonucleotide
  modified_base 4..6: mod_base = OTHER; note = 2'-O-methyl ribonucleotide
  modified_base 7..9: mod_base = OTHER; note = 2'-fluoro ribonucleotide
  modified_base 10..11: mod_base = OTHER; note = 2'-O-methyl ribonucleotide
  modified_base 12: mod_base = OTHER; note = 2'-fluoro ribonucleotide
  modified_base 13..16: mod_base = OTHER; note = 2'-O-methyl ribonucleotide
  modified_base 17: mod_base = OTHER; note = 2'-fluoro ribonucleotide
  modified_base 18..19: mod_base = OTHER; note = 2'-O-methyl ribonucleotide
  modified_base 20: mod_base = OTHER; note = inverted deoxythymidine
  modified_base 1..3: mod_base = OTHER; note = phosphorothioate linkage
  misc_feature 1..19: note = RNA
  misc_feature 20: note = DNA
aagaagccaaccaataagat

SEQ ID NO: 102 - DNA, 20 bp, synthetic construct
  source 1..20: mol_type = other DNA
  modified_base 1..2: mod_base = OTHER; note = 2'-O-methyl ribonucleotide
  modified_base 3: mod_base = OTHER; note = 2'-fluoro ribonucleotide
  modified_base 4..6: mod_base = OTHER; note = 2'-O-methyl ribonucleotide
  modified_base 7..9: mod_base = OTHER; note = 2'-fluoro ribonucleotide
  modified_base 10..11: mod_base = OTHER; note = 2'-O-methyl ribonucleotide
  modified_base 12: mod_base = OTHER; note = 2'-fluoro ribonucleotide
  modified_base 13..16: mod_base = OTHER; note = 2'-O-methyl ribonucleotide
  modified_base 17: mod_base = OTHER; note = 2'-fluoro ribonucleotide
  modified_base 18..19: mod_base = OTHER; note = 2'-O-methyl ribonucleotide
  modified_base 20: mod_base = OTHER; note = inverted deoxythymidine
  modified_base 1..3: mod_base = OTHER; note = phosphorothioate linkage
  misc_feature 1..19: note = RNA
  misc_feature 20: note = DNA
aagccaaccaataaggccat

SEQ ID NO: 103 - DNA, 20 bp, synthetic construct
  source 1..20: mol_type = other DNA
  modified_base 1..2: mod_base = OTHER; note = 2'-O-methyl ribonucleotide
  modified_base 3: mod_base = OTHER; note = 2'-fluoro ribonucleotide
  modified_base 4..6: mod_base = OTHER; note = 2'-O-methyl ribonucleotide
  modified_base 7..9: mod_base = OTHER; note = 2'-fluoro ribonucleotide
  modified_base 10..11: mod_base = OTHER; note = 2'-O-methyl ribonucleotide
  modified_base 12: mod_base = OTHER; note = 2'-fluoro ribonucleotide
  modified_base 13..16: mod_base = OTHER; note = 2'-O-methyl ribonucleotide
  modified_base 17: mod_base = OTHER; note = 2'-fluoro ribonucleotide
  modified_base 18..19: mod_base = OTHER; note = 2'-O-methyl ribonucleotide
  modified_base 20: mod_base = OTHER; note = inverted deoxythymidine
  modified_base 1..3: mod_base = OTHER; note = phosphorothioate linkage
  misc_feature 1..19: note = RNA
  misc_feature 20: note = DNA
agatcaattttcccgacgat

SEQ ID NO: 104 - DNA, 20 bp, synthetic construct
  source 1..20: mol_type = other DNA
  modified_base 1..2: mod_base = OTHER; note = 2'-O-methyl ribonucleotide
  modified_base 3: mod_base = OTHER; note = 2'-fluoro ribonucleotide
  modified_base 4..6: mod_base = OTHER; note = 2'-O-methyl ribonucleotide
  modified_base 7..9: mod_base = OTHER; note = 2'-fluoro ribonucleotide
  modified_base 10..11: mod_base = OTHER; note = 2'-O-methyl ribonucleotide
  modified_base 12: mod_base = OTHER; note = 2'-fluoro ribonucleotide
  modified_base 13..16: mod_base = OTHER; note = 2'-O-methyl ribonucleotide
  modified_base 17: mod_base = OTHER; note = 2'-fluoro ribonucleotide
  modified_base 18..19: mod_base = OTHER; note = 2'-O-methyl ribonucleotide
  modified_base 20: mod_base = OTHER; note = inverted deoxythymidine
  modified_base 1..3: mod_base = OTHER; note = phosphorothioate linkage
  misc_feature 1..19: note = RNA
  misc_feature 20: note = DNA
gatcaattttcccgacgaat

SEQ ID NO: 105 - DNA, 20 bp, synthetic construct
  source 1..20: mol_type = other DNA
  modified_base 1..2: mod_base = OTHER; note = 2'-O-methyl ribonucleotide
  modified_base 3: mod_base = OTHER; note = 2'-fluoro ribonucleotide
  modified_base 4..6: mod_base = OTHER; note = 2'-O-methyl ribonucleotide
  modified_base 7..9: mod_base = OTHER; note = 2'-fluoro ribonucleotide
  modified_base 10..11: mod_base = OTHER; note = 2'-O-methyl ribonucleotide
  modified_base 12: mod_base = OTHER; note = 2'-fluoro ribonucleotide
  modified_base 13..16: mod_base = OTHER; note = 2'-O-methyl ribonucleotide
  modified_base 17: mod_base = OTHER; note = 2'-fluoro ribonucleotide
  modified_base 18..19: mod_base = OTHER; note = 2'-O-methyl ribonucleotide
  modified_base 20: mod_base = OTHER; note = inverted deoxythymidine
  modified_base 1..3: mod_base = OTHER; note = phosphorothioate linkage
  misc_feature 1..19: note = RNA
  misc_feature 20: note = DNA
atcaattttcccgacgatat

SEQ ID NO: 106 - DNA, 20 bp, synthetic construct
  source 1..20: mol_type = other DNA
  modified_base 1..2: mod_base = OTHER; note = 2'-O-methyl ribonucleotide
  modified_base 3: mod_base = OTHER; note = 2'-fluoro ribonucleotide
  modified_base 4..6: mod_base = OTHER; note = 2'-O-methyl ribonucleotide
  modified_base 7..9: mod_base = OTHER; note = 2'-fluoro ribonucleotide
  modified_base 10..11: mod_base = OTHER; note = 2'-O-methyl ribonucleotide
  modified_base 12: mod_base = OTHER; note = 2'-fluoro ribonucleotide
  modified_base 13..16: mod_base = OTHER; note = 2'-O-methyl ribonucleotide
  modified_base 17: mod_base = OTHER; note = 2'-fluoro ribonucleotide
  modified_base 18..19: mod_base = OTHER; note = 2'-O-methyl ribonucleotide
  modified_base 20: mod_base = OTHER; note = inverted deoxythymidine
  modified_base 1..3: mod_base = OTHER; note = phosphorothioate linkage
  misc_feature 1..19: note = RNA
  misc_feature 20: note = DNA
tcaattttcccgacgatcat

SEQ ID NO: 107 - DNA, 20 bp, synthetic construct
  source 1..20: mol_type = other DNA
  modified_base 1..2: mod_base = OTHER; note = 2'-O-methyl ribonucleotide
  modified_base 3: mod_base = OTHER; note = 2'-fluoro ribonucleotide
  modified_base 4..6: mod_base = OTHER; note = 2'-O-methyl ribonucleotide
  modified_base 7..9: mod_base = OTHER; note = 2'-fluoro ribonucleotide
  modified_base 10..11: mod_base = OTHER; note = 2'-O-methyl ribonucleotide
  modified_base 12: mod_base = OTHER; note = 2'-fluoro ribonucleotide
  modified_base 13..16: mod_base = OTHER; note = 2'-O-methyl ribonucleotide
  modified_base 17: mod_base = OTHER; note = 2'-fluoro ribonucleotide
  modified_base 18..19: mod_base = OTHER; note = 2'-O-methyl ribonucleotide
  modified_base 20: mod_base = OTHER; note = inverted deoxythymidine
  modified_base 1..3: mod_base = OTHER; note = phosphorothioate linkage
  misc_feature 1..19: note = RNA
  misc_feature 20: note = DNA
cgacgatcttcctggctcat

SEQ ID NO: 108 - DNA, 20 bp, synthetic construct
  source 1..20: mol_type = other DNA
  modified_base 1..2: mod_base = OTHER; note = 2'-O-methyl ribonucleotide
  modified_base 3: mod_base = OTHER; note = 2'-fluoro ribonucleotide
  modified_base 4..6: mod_base = OTHER; note = 2'-O-methyl ribonucleotide
  modified_base 7..9: mod_base = OTHER; note = 2'-fluoro ribonucleotide
  modified_base 10..11: mod_base = OTHER; note = 2'-O-methyl ribonucleotide
  modified_base 12: mod_base = OTHER; note = 2'-fluoro ribonucleotide
  modified_base 13..16: mod_base = OTHER; note = 2'-O-methyl ribonucleotide
  modified_base 17: mod_base = OTHER; note = 2'-fluoro ribonucleotide
  modified_base 18..19: mod_base = OTHER; note = 2'-O-methyl ribonucleotide
  modified_base 20: mod_base = OTHER; note = inverted deoxythymidine
  modified_base 1..3: mod_base = OTHER; note = phosphorothioate linkage
  misc_feature 1..19: note = RNA
  misc_feature 20: note = DNA
acgatcttcctggctccaat

SEQ ID NO: 109 - DNA, 20 bp, synthetic construct
  source 1..20: mol_type = other DNA
  modified_base 1..2: mod_base = OTHER; note = 2'-O-methyl ribonucleotide
  modified_base 3: mod_base = OTHER; note = 2'-fluoro ribonucleotide
  modified_base 4..6: mod_base = OTHER; note = 2'-O-methyl ribonucleotide
  modified_base 7..9: mod_base = OTHER; note = 2'-fluoro ribonucleotide
  modified_base 10..11: mod_base = OTHER; note = 2'-O-methyl ribonucleotide
  modified_base 12: mod_base = OTHER; note = 2'-fluoro ribonucleotide
  modified_base 13..16: mod_base = OTHER; note = 2'-O-methyl ribonucleotide
  modified_base 17: mod_base = OTHER; note = 2'-fluoro ribonucleotide
  modified_base 18..19: mod_base = OTHER; note = 2'-O-methyl ribonucleotide
  modified_base 20: mod_base = OTHER; note = inverted deoxythymidine
  modified_base 1..3: mod_base = OTHER; note = phosphorothioate linkage
  misc_feature 1..19: note = RNA
  misc_feature 20: note = DNA
gatcttcctggctccaacat

SEQ ID NO: 110 - DNA, 20 bp, synthetic construct
  source 1..20: mol_type = other DNA
  modified_base 1..2: mod_base = OTHER; note = 2'-O-methyl ribonucleotide
  modified_base 3: mod_base = OTHER; note = 2'-fluoro ribonucleotide
  modified_base 4..6: mod_base = OTHER; note = 2'-O-methyl ribonucleotide
  modified_base 7..9: mod_base = OTHER; note = 2'-fluoro ribonucleotide
  modified_base 10..11: mod_base = OTHER; note = 2'-O-methyl ribonucleotide
  modified_base 12: mod_base = OTHER; note = 2'-fluoro ribonucleotide
  modified_base 13..16: mod_base = OTHER; note = 2'-O-methyl ribonucleotide
  modified_base 17: mod_base = OTHER; note = 2'-fluoro ribonucleotide
  modified_base 18..19: mod_base = OTHER; note = 2'-O-methyl ribonucleotide
  modified_base 20: mod_base = OTHER; note = inverted deoxythymidine
  modified_base 1..3: mod_base = OTHER; note = phosphorothioate linkage
  misc_feature 1..19: note = RNA
  misc_feature 20: note = DNA
tgcaggagactttacatgat

SEQ ID NO: 111 - DNA, 20 bp, synthetic construct
  source 1..20: mol_type = other DNA
  modified_base 1..2: mod_base = OTHER; note = 2'-O-methyl ribonucleotide
  modified_base 3: mod_base = OTHER; note = 2'-fluoro ribonucleotide
  modified_base 4..6: mod_base = OTHER; note = 2'-O-methyl ribonucleotide
  modified_base 7..9: mod_base = OTHER; note = 2'-fluoro ribonucleotide
  modified_base 10..11: mod_base = OTHER; note = 2'-O-methyl ribonucleotide
  modified_base 12: mod_base = OTHER; note = 2'-fluoro ribonucleotide
  modified_base 13..16: mod_base = OTHER; note = 2'-O-methyl ribonucleotide
  modified_base 17: mod_base = OTHER; note = 2'-fluoro ribonucleotide
  modified_base 18..19: mod_base = OTHER; note = 2'-O-methyl ribonucleotide
  modified_base 20: mod_base = OTHER; note = inverted deoxythymidine
  modified_base 1..3: mod_base = OTHER; note = phosphorothioate linkage
  misc_feature 1..19: note = RNA
  misc_feature 20: note = DNA
caggagactttacatggaat

SEQ ID NO: 112 - DNA, 20 bp, synthetic construct
  source 1..20: mol_type = other DNA
  modified_base 1..2: mod_base = OTHER; note = 2'-O-methyl ribonucleotide
  modified_base 3: mod_base = OTHER; note = 2'-fluoro ribonucleotide
  modified_base 4..6: mod_base = OTHER; note = 2'-O-methyl ribonucleotide
  modified_base 7..9: mod_base = OTHER; note = 2'-fluoro ribonucleotide
  modified_base 10..11: mod_base = OTHER; note = 2'-O-methyl ribonucleotide
  modified_base 12: mod_base = OTHER; note = 2'-fluoro ribonucleotide
  modified_base 13..16: mod_base = OTHER; note = 2'-O-methyl ribonucleotide
  modified_base 17: mod_base = OTHER; note = 2'-fluoro ribonucleotide
  modified_base 18..19: mod_base = OTHER; note = 2'-O-methyl ribonucleotide
  modified_base 20: mod_base = OTHER; note = inverted deoxythymidine
  modified_base 1..3: mod_base = OTHER; note = phosphorothioate linkage
  misc_feature 1..19: note = RNA
  misc_feature 20: note = DNA
ggagactttacatggatgat

SEQ ID NO: 113 - DNA, 20 bp, synthetic construct
  source 1..20: mol_type = other DNA
  modified_base 1..2: mod_base = OTHER; note = 2'-O-methyl ribonucleotide
  modified_base 3: mod_base = OTHER; note = 2'-fluoro ribonucleotide
  modified_base 4..6: mod_base = OTHER; note = 2'-O-methyl ribonucleotide
  modified_base 7..9: mod_base = OTHER; note = 2'-fluoro ribonucleotide
  modified_base 10..11: mod_base = OTHER; note = 2'-O-methyl ribonucleotide
  modified_base 12: mod_base = OTHER; note = 2'-fluoro ribonucleotide
  modified_base 13..16: mod_base = OTHER; note = 2'-O-methyl ribonucleotide
  modified_base 17: mod_base = OTHER; note = 2'-fluoro ribonucleotide
  modified_base 18..19: mod_base = OTHER; note = 2'-O-methyl ribonucleotide
  modified_base 20: mod_base = OTHER; note = inverted deoxythymidine
  modified_base 1..3: mod_base = OTHER; note = phosphorothioate linkage
  misc_feature 1..19: note = RNA
  misc_feature 20: note = DNA
aggatggcaaagagagtcat

SEQ ID NO: 114 - DNA, 20 bp, synthetic construct
  source 1..20: mol_type = other DNA
  modified_base 1..2: mod_base = OTHER; note = 2'-O-methyl ribonucleotide
  modified_base 3: mod_base = OTHER; note = 2'-fluoro ribonucleotide
  modified_base 4..6: mod_base = OTHER; note = 2'-O-methyl ribonucleotide
  modified_base 7..9: mod_base = OTHER; note = 2'-fluoro ribonucleotide
  modified_base 10..11: mod_base = OTHER; note = 2'-O-methyl ribonucleotide
  modified_base 12: mod_base = OTHER; note = 2'-fluoro ribonucleotide
  modified_base 13..16: mod_base = OTHER; note = 2'-O-methyl ribonucleotide
  modified_base 17: mod_base = OTHER; note = 2'-fluoro ribonucleotide
  modified_base 18..19: mod_base = OTHER; note = 2'-O-methyl ribonucleotide
  modified_base 20: mod_base = OTHER; note = inverted deoxythymidine
  modified_base 1..3: mod_base = OTHER; note = phosphorothioate linkage
  misc_feature 1..19: note = RNA
  misc_feature 20: note = DNA
ggatggcaaagagagtcgat

SEQ ID NO: 115 - DNA, 20 bp, synthetic construct
  source 1..20: mol_type = other DNA
  modified_base 1..2: mod_base = OTHER; note = 2'-O-methyl ribonucleotide
  modified_base 3: mod_base = OTHER; note = 2'-fluoro ribonucleotide
  modified_base 4..6: mod_base = OTHER; note = 2'-O-methyl ribonucleotide
  modified_base 7..9: mod_base = OTHER; note = 2'-fluoro ribonucleotide
  modified_base 10..11: mod_base = OTHER; note = 2'-O-methyl ribonucleotide
  modified_base 12: mod_base = OTHER; note = 2'-fluoro ribonucleotide
  modified_base 13..16: mod_base = OTHER; note = 2'-O-methyl ribonucleotide
  modified_base 17: mod_base = OTHER; note = 2'-fluoro ribonucleotide
  modified_base 18..19: mod_base = OTHER; note = 2'-O-methyl ribonucleotide
  modified_base 20: mod_base = OTHER; note = inverted deoxythymidine
  modified_base 1..3: mod_base = OTHER; note = phosphorothioate linkage
  misc_feature 1..19: note = RNA
  misc_feature 20: note = DNA
tggcaaagagagtcgcatat

SEQ ID NO: 116 - DNA, 20 bp, synthetic construct
  source 1..20: mol_type = other DNA
  modified_base 1..2: mod_base = OTHER; note = 2'-O-methyl ribonucleotide
  modified_base 3: mod_base = OTHER; note = 2'-fluoro ribonucleotide
  modified_base 4..6: mod_base = OTHER; note = 2'-O-methyl ribonucleotide
  modified_base 7..9: mod_base = OTHER; note = 2'-fluoro ribonucleotide
  modified_base 10..11: mod_base = OTHER; note = 2'-O-methyl ribonucleotide
  modified_base 12: mod_base = OTHER; note = 2'-fluoro ribonucleotide
  modified_base 13..16: mod_base = OTHER; note = 2'-O-methyl ribonucleotide
  modified_base 17: mod_base = OTHER; note = 2'-fluoro ribonucleotide
  modified_base 18..19: mod_base = OTHER; note = 2'-O-methyl ribonucleotide
  modified_base 20: mod_base = OTHER; note = inverted deoxythymidine
  modified_base 1..3: mod_base = OTHER; note = phosphorothioate linkage
  misc_feature 1..19: note = RNA
  misc_feature 20: note = DNA
ggcaaagagagtcgcatcat

SEQ ID NO: 117 - DNA, 20 bp, synthetic construct
  source 1..20: mol_type = other DNA
  modified_base 1..2: mod_base = OTHER; note = 2'-O-methyl ribonucleotide
  modified_base 3: mod_base = OTHER; note = 2'-fluoro ribonucleotide
  modified_base 4..6: mod_base = OTHER; note = 2'-O-methyl ribonucleotide
  modified_base 7..9: mod_base = OTHER; note = 2'-fluoro ribonucleotide
  modified_base 10..11: mod_base = OTHER; note = 2'-O-methyl ribonucleotide
  modified_base 12: mod_base = OTHER; note = 2'-fluoro ribonucleotide
  modified_base 13..16: mod_base = OTHER; note = 2'-O-methyl ribonucleotide
  modified_base 17: mod_base = OTHER; note = 2'-fluoro ribonucleotide
  modified_base 18..19: mod_base = OTHER; note = 2'-O-methyl ribonucleotide
  modified_base 20: mod_base = OTHER; note = inverted deoxythymidine
  modified_base 1..3: mod_base = OTHER; note = phosphorothioate linkage
  misc_feature 1..19: note = RNA
  misc_feature 20: note = DNA
gcaaagagagtcgcatctat

SEQ ID NO: 118 - DNA, 20 bp, synthetic construct
  source 1..20: mol_type = other DNA
  modified_base 1..2: mod_base = OTHER; note = 2'-O-methyl ribonucleotide
  modified_base 3: mod_base = OTHER; note = 2'-fluoro ribonucleotide
  modified_base 4..6: mod_base = OTHER; note = 2'-O-methyl ribonucleotide
  modified_base 7..9: mod_base = OTHER; note = 2'-fluoro ribonucleotide
  modified_base 10..11: mod_base = OTHER; note = 2'-O-methyl ribonucleotide
  modified_base 12: mod_base = OTHER; note = 2'-fluoro ribonucleotide
  modified_base 13..16: mod_base = OTHER; note = 2'-O-methyl ribonucleotide
  modified_base 17: mod_base = OTHER; note = 2'-fluoro ribonucleotide
  modified_base 18..19: mod_base = OTHER; note = 2'-O-methyl ribonucleotide
  modified_base 20: mod_base = OTHER; note = inverted deoxythymidine
  modified_base 1..3: mod_base = OTHER; note = phosphorothioate linkage
  misc_feature 1..19: note = RNA
  misc_feature 20: note = DNA
aaagagagtcgcatctcaat

SEQ ID NO: 119 - DNA, 20 bp, synthetic construct
  source 1..20: mol_type = other DNA
  modified_base 1..2: mod_base = OTHER; note = 2'-O-methyl ribonucleotide
  modified_base 3: mod_base = OTHER; note = 2'-fluoro ribonucleotide
  modified_base 4..6: mod_base = OTHER; note = 2'-O-methyl ribonucleotide
  modified_base 7..9: mod_base = OTHER; note = 2'-fluoro ribonucleotide
  modified_base 10..11: mod_base = OTHER; note = 2'-O-methyl ribonucleotide
  modified_base 12: mod_base = OTHER; note = 2'-fluoro ribonucleotide
  modified_base 13..16: mod_base = OTHER; note = 2'-O-methyl ribonucleotide
  modified_base 17: mod_base = OTHER; note = 2'-fluoro ribonucleotide
  modified_base 18..19: mod_base = OTHER; note = 2'-O-methyl ribonucleotide
  modified_base 20: mod_base = OTHER; note = inverted deoxythymidine
  modified_base 1..3: mod_base = OTHER; note = phosphorothioate linkage
  misc_feature 1..19: note = RNA
  misc_feature 20: note = DNA
aagagagtcgcatctcagat

SEQ ID NO: 120 - DNA, 20 bp, synthetic construct
  source 1..20: mol_type = other DNA
  modified_base 1..2: mod_base = OTHER; note = 2'-O-methyl ribonucleotide
  modified_base 3: mod_base = OTHER; note = 2'-fluoro ribonucleotide
  modified_base 4..6: mod_base = OTHER; note = 2'-O-methyl ribonucleotide
  modified_base 7..9: mod_base = OTHER; note = 2'-fluoro ribonucleotide
  modified_base 10..11: mod_base = OTHER; note = 2'-O-methyl ribonucleotide
  modified_base 12: mod_base = OTHER; note = 2'-fluoro ribonucleotide
  modified_base 13..16: mod_base = OTHER; note = 2'-O-methyl ribonucleotide
  modified_base 17: mod_base = OTHER; note = 2'-fluoro ribonucleotide
  modified_base 18..19: mod_base = OTHER; note = 2'-O-methyl ribonucleotide
  modified_base 20: mod_base = OTHER; note = inverted deoxythymidine
  modified_base 1..3: mod_base = OTHER; note = phosphorothioate linkage
  misc_feature 1..19: note = RNA
  misc_feature 20: note = DNA
agagagtcgcatctcagtat

SEQ ID NO: 121 - DNA, 20 bp, synthetic construct
  source 1..20: mol_type = other DNA
  modified_base 1..2: mod_base = OTHER; note = 2'-O-methyl ribonucleotide
  modified_base 3: mod_base = OTHER; note = 2'-fluoro ribonucleotide
  modified_base 4..6: mod_base = OTHER; note = 2'-O-methyl ribonucleotide
  modified_base 7..9: mod_base = OTHER; note = 2'-fluoro ribonucleotide
  modified_base 10..11: mod_base = OTHER; note = 2'-O-methyl ribonucleotide
  modified_base 12: mod_base = OTHER; note = 2'-fluoro ribonucleotide
  modified_base 13..16: mod_base = OTHER; note = 2'-O-methyl ribonucleotide
  modified_base 17: mod_base = OTHER; note = 2'-fluoro ribonucleotide
  modified_base 18..19: mod_base = OTHER; note = 2'-O-methyl ribonucleotide
  modified_base 20: mod_base = OTHER; note = inverted deoxythymidine
  modified_base 1..3: mod_base = OTHER; note = phosphorothioate linkage
  misc_feature 1..19: note = RNA
  misc_feature 20: note = DNA
gagagtcgcatctcagtgat

SEQ ID NO: 122 - DNA, 20 bp, synthetic construct
  source 1..20: mol_type = other DNA
  modified_base 1..2: mod_base = OTHER; note = 2'-O-methyl ribonucleotide
  modified_base 3: mod_base = OTHER; note = 2'-fluoro ribonucleotide
  modified_base 4..6: mod_base = OTHER; note = 2'-O-methyl ribonucleotide
  modified_base 7..9: mod_base = OTHER; note = 2'-fluoro ribonucleotide
  modified_base 10..11: mod_base = OTHER; note = 2'-O-methyl ribonucleotide
  modified_base 12: mod_base = OTHER; note = 2'-fluoro ribonucleotide
  modified_base 13..16: mod_base = OTHER; note = 2'-O-methyl ribonucleotide
  modified_base 17: mod_base = OTHER; note = 2'-fluoro ribonucleotide
  modified_base 18..19: mod_base = OTHER; note = 2'-O-methyl ribonucleotide
  modified_base 20: mod_base = OTHER; note = inverted deoxythymidine
  modified_base 1..3: mod_base = OTHER; note = phosphorothioate linkage
  misc_feature 1..19: note = RNA
  misc_feature 20: note = DNA
agagtcgcatctcagtgcat

SEQ ID NO: 123 - DNA, 20 bp, synthetic construct
  source 1..20: mol_type = other DNA
  modified_base 1..2: mod_base = OTHER; note = 2'-O-methyl ribonucleotide
  modified_base 3: mod_base = OTHER; note = 2'-fluoro ribonucleotide
  modified_base 4..6: mod_base = OTHER; note = 2'-O-methyl ribonucleotide
  modified_base 7..9: mod_base = OTHER; note = 2'-fluoro ribonucleotide
  modified_base 10..11: mod_base = OTHER; note = 2'-O-methyl ribonucleotide
  modified_base 12: mod_base = OTHER; note = 2'-fluoro ribonucleotide
  modified_base 13..16: mod_base = OTHER; note = 2'-O-methyl ribonucleotide
  modified_base 17: mod_base = OTHER; note = 2'-fluoro ribonucleotide
  modified_base 18..19: mod_base = OTHER; note = 2'-O-methyl ribonucleotide
  modified_base 20: mod_base = OTHER; note = inverted deoxythymidine
  modified_base 1..3: mod_base = OTHER; note = phosphorothioate linkage
  misc_feature 1..19: note = RNA
  misc_feature 20: note = DNA
gagtcgcatctcagtgcaat

SEQ ID NO: 124 - DNA, 20 bp, synthetic construct
  source 1..20: mol_type = other DNA
  modified_base 1..2: mod_base = OTHER; note = 2'-O-methyl ribonucleotide
  modified_base 3: mod_base = OTHER; note = 2'-fluoro ribonucleotide
  modified_base 4..6: mod_base = OTHER; note = 2'-O-methyl ribonucleotide
  modified_base 7..9: mod_base = OTHER; note = 2'-fluoro ribonucleotide
  modified_base 10..11: mod_base = OTHER; note = 2'-O-methyl ribonucleotide
  modified_base 12: mod_base = OTHER; note = 2'-fluoro ribonucleotide
  modified_base 13..16: mod_base = OTHER; note = 2'-O-methyl ribonucleotide
  modified_base 17: mod_base = OTHER; note = 2'-fluoro ribonucleotide
  modified_base 18..19: mod_base = OTHER; note = 2'-O-methyl ribonucleotide
  modified_base 20: mod_base = OTHER; note = inverted deoxythymidine
  modified_base 1..3: mod_base = OTHER; note = phosphorothioate linkage
  misc_feature 1..19: note = RNA
  misc_feature 20: note = DNA
gtcgcatctcagtgcaggat

SEQ ID NO: 125 - DNA, 20 bp, synthetic construct
  source 1..20: mol_type = other DNA
  modified_base 1..2: mod_base = OTHER; note = 2'-O-methyl ribonucleotide
  modified_base 3: mod_base = OTHER; note = 2'-fluoro ribonucleotide
  modified_base 4..6: mod_base = OTHER; note = 2'-O-methyl ribonucleotide
  modified_base 7..9: mod_base = OTHER; note = 2'-fluoro ribonucleotide
  modified_base 10..11: mod_base = OTHER; note = 2'-O-methyl ribonucleotide
  modified_base 12: mod_base = OTHER; note = 2'-fluoro ribonucleotide
  modified_base 13..16: mod_base = OTHER; note = 2'-O-methyl ribonucleotide
  modified_base 17: mod_base = OTHER; note = 2'-fluoro ribonucleotide
  modified_base 18..19: mod_base = OTHER; note = 2'-O-methyl ribonucleotide
  modified_base 20: mod_base = OTHER; note = inverted deoxythymidine
  modified_base 1..3: mod_base = OTHER; note = phosphorothioate linkage
  misc_feature 1..19: note = RNA
  misc_feature 20: note = DNA
ctgctgtggcgtgagggtat

SEQ ID NO: 126 - DNA, 20 bp, synthetic construct
  source 1..20: mol_type = other DNA
  modified_base 1..2: mod_base = OTHER; note = 2'-O-methyl ribonucleotide
  modified_base 3: mod_base = OTHER; note = 2'-fluoro ribonucleotide
  modified_base 4..6: mod_base = OTHER; note = 2'-O-methyl ribonucleotide
  modified_base 7..9: mod_base = OTHER; note = 2'-fluoro ribonucleotide
  modified_base 10..11: mod_base = OTHER; note = 2'-O-methyl ribonucleotide
  modified_base 12: mod_base = OTHER; note = 2'-fluoro ribonucleotide
  modified_base 13..16: mod_base = OTHER; note = 2'-O-methyl ribonucleotide
  modified_base 17: mod_base = OTHER; note = 2'-fluoro ribonucleotide
  modified_base 18..19: mod_base = OTHER; note = 2'-O-methyl ribonucleotide
  modified_base 20: mod_base = OTHER; note = inverted deoxythymidine
  modified_base 1..3: mod_base = OTHER; note = phosphorothioate linkage
  misc_feature 1..19: note = RNA
  misc_feature 20: note = DNA
ggcactgactgggcatagat

SEQ ID NO: 127 - DNA, 20 bp, synthetic construct
  source 1..20: mol_type = other DNA
  modified_base 1..2: mod_base = OTHER; note = 2'-O-methyl ribonucleotide
  modified_base 3: mod_base = OTHER; note = 2'-fluoro ribonucleotide
  modified_base 4..6: mod_base = OTHER; note = 2'-O-methyl ribonucleotide
  modified_base 7..9: mod_base = OTHER; note = 2'-fluoro ribonucleotide
  modified_base 10..11: mod_base = OTHER; note = 2'-O-methyl ribonucleotide
  modified_base 12: mod_base = OTHER; note = 2'-fluoro ribonucleotide
  modified_base 13..16: mod_base = OTHER; note = 2'-O-methyl ribonucleotide
  modified_base 17: mod_base = OTHER; note = 2'-fluoro ribonucleotide
  modified_base 18..19: mod_base = OTHER; note = 2'-O-methyl ribonucleotide
  modified_base 20: mod_base = OTHER; note = inverted deoxythymidine
  modified_base 1..3: mod_base = OTHER; note = phosphorothioate linkage
  misc_feature 1..19: note = RNA
  misc_feature 20: note = DNA
gggcatagctccccgcttat

SEQ ID NO: 128 - DNA, 20 bp, synthetic construct
  source 1..20: mol_type = other DNA
  modified_base 1..2: mod_base = OTHER; note = 2'-O-methyl ribonucleotide
  modified_base 3: mod_base = OTHER; note = 2'-fluoro ribonucleotide
  modified_base 4..6: mod_base = OTHER; note = 2'-O-methyl ribonucleotide
  modified_base 7..9: mod_base = OTHER; note = 2'-fluoro ribonucleotide
  modified_base 10..11: mod_base = OTHER; note = 2'-O-methyl ribonucleotide
  modified_base 12: mod_base = OTHER; note = 2'-fluoro ribonucleotide
  modified_base 13..16: mod_base = OTHER; note = 2'-O-methyl ribonucleotide
  modified_base 17: mod_base = OTHER; note = 2'-fluoro ribonucleotide
  modified_base 18..19: mod_base = OTHER; note = 2'-O-methyl ribonucleotide
  modified_base 20: mod_base = OTHER; note = inverted deoxythymidine
  modified_base 1..3: mod_base = OTHER; note = phosphorothioate linkage
  misc_feature 1..19: note = RNA
  misc_feature 20: note = DNA
agaacctctcacttcaccat

SEQ ID NO: 129 - DNA, 20 bp, synthetic construct
  source 1..20: mol_type = other DNA
  modified_base 1..2: mod_base = OTHER; note = 2'-O-methyl ribonucleotide
  modified_base 3: mod_base = OTHER; note = 2'-fluoro ribonucleotide
  modified_base 4..6: mod_base = OTHER; note = 2'-O-methyl ribonucleotide
  modified_base 7..9: mod_base = OTHER; note = 2'-fluoro ribonucleotide
  modified_base 10..11: mod_base = OTHER; note = 2'-O-methyl ribonucleotide
  modified_base 12: mod_base = OTHER; note = 2'-fluoro ribonucleotide
  modified_base 13..16: mod_base = OTHER; note = 2'-O-methyl ribonucleotide
  modified_base 17: mod_base = OTHER; note = 2'-fluoro ribonucleotide
  modified_base 18..19: mod_base = OTHER; note = 2'-O-methyl ribonucleotide
  modified_base 20: mod_base = OTHER; note = inverted deoxythymidine
  modified_base 1..3: mod_base = OTHER; note = phosphorothioate linkage
  misc_feature 1..19: note = RNA
  misc_feature 20: note = DNA
gaacctctcacttcacccat

SEQ ID NO: 130 - DNA, 20 bp, synthetic construct
  source 1..20: mol_type = other DNA
  modified_base 1..2: mod_base = OTHER; note = 2'-O-methyl ribonucleotide
  modified_base 3: mod_base = OTHER; note = 2'-fluoro ribonucleotide
  modified_base 4..6: mod_base = OTHER; note = 2'-O-methyl ribonucleotide
  modified_base 7..9: mod_base = OTHER; note = 2'-fluoro ribonucleotide
  modified_base 10..11: mod_base = OTHER; note = 2'-O-methyl ribonucleotide
  modified_base 12: mod_base = OTHER; note = 2'-fluoro ribonucleotide
  modified_base 13..16: mod_base = OTHER; note = 2'-O-methyl ribonucleotide
  modified_base 17: mod_base = OTHER; note = 2'-fluoro ribonucleotide
  modified_base 18..19: mod_base = OTHER; note = 2'-O-methyl ribonucleotide
  modified_base 20: mod_base = OTHER; note = inverted deoxythymidine
  modified_base 1..3: mod_base = OTHER; note = phosphorothioate linkage
  misc_feature 1..19: note = RNA
  misc_feature 20: note = DNA
agtctcccaacttgtattat

SEQ ID NO: 131 - DNA, 20 bp, synthetic construct
  source 1..20: mol_type = other DNA
  modified_base 1..2: mod_base = OTHER; note = 2'-O-methyl ribonucleotide
  modified_base 3: mod_base = OTHER; note = 2'-fluoro ribonucleotide
  modified_base 4..6: mod_base = OTHER; note = 2'-O-methyl ribonucleotide
  modified_base 7..9: mod_base = OTHER; note = 2'-fluoro ribonucleotide
  modified_base 10..11: mod_base = OTHER; note = 2'-O-methyl ribonucleotide
  modified_base 12: mod_base = OTHER; note = 2'-fluoro ribonucleotide
  modified_base 13..16: mod_base = OTHER; note = 2'-O-methyl ribonucleotide
  modified_base 17: mod_base = OTHER; note = 2'-fluoro ribonucleotide
  modified_base 18..19: mod_base = OTHER; note = 2'-O-methyl ribonucleotide
  modified_base 20: mod_base = OTHER; note = inverted deoxythymidine
  modified_base 1..3: mod_base = OTHER; note = phosphorothioate linkage
  misc_feature 1..19: note = RNA
  misc_feature 20: note = DNA
ggtttagtaatatccaccat

SEQ ID NO: 132 - DNA, 20 bp, synthetic construct
  source 1..20: mol_type = other DNA
  modified_base 1..2: mod_base = OTHER; note = 2'-O-methyl ribonucleotide
  modified_base 3: mod_base = OTHER; note = 2'-fluoro ribonucleotide
  modified_base 4..6: mod_base = OTHER; note = 2'-O-methyl ribonucleotide
  modified_base 7..9: mod_base = OTHER; note = 2'-fluoro ribonucleotide
  modified_base 10..11: mod_base = OTHER; note = 2'-O-methyl ribonucleotide
  modified_base 12: mod_base = OTHER; note = 2'-fluoro ribonucleotide
  modified_base 13..16: mod_base = OTHER; note = 2'-O-methyl ribonucleotide
  modified_base 17: mod_base = OTHER; note = 2'-fluoro ribonucleotide
  modified_base 18..19: mod_base = OTHER; note = 2'-O-methyl ribonucleotide
  modified_base 20: mod_base = OTHER; note = inverted deoxythymidine
  modified_base 1..3: mod_base = OTHER; note = phosphorothioate linkage
  misc_feature 1..19: note = RNA
  misc_feature 20: note = DNA
gtttagtaatatccaccaat

SEQ ID NO: 133 - DNA, 20 bp, synthetic construct
  source 1..20: mol_type = other DNA
  modified_base 1..2: mod_base = OTHER; note = 2'-O-methyl ribonucleotide
  modified_base 3: mod_base = OTHER; note = 2'-fluoro ribonucleotide
  modified_base 4..6: mod_base = OTHER; note = 2'-O-methyl ribonucleotide
  modified_base 7..9: mod_base = OTHER; note = 2'-fluoro ribonucleotide
  modified_base 10..11: mod_base = OTHER; note = 2'-O-methyl ribonucleotide
  modified_base 12: mod_base = OTHER; note = 2'-fluoro ribonucleotide
  modified_base 13..16: mod_base = OTHER; note = 2'-O-methyl ribonucleotide
  modified_base 17: mod_base = OTHER; note = 2'-fluoro ribonucleotide
  modified_base 18..19: mod_base = OTHER; note = 2'-O-methyl ribonucleotide
  modified_base 20: mod_base = OTHER; note = inverted deoxythymidine
  modified_base 1..3: mod_base = OTHER; note = phosphorothioate linkage
  misc_feature 1..19: note = RNA
  misc_feature 20: note = DNA
tttagtaatatccaccagat

SEQ ID NO: 134 - DNA, 20 bp, synthetic construct
  source 1..20: mol_type = other DNA
  modified_base 1..2: mod_base = OTHER; note = 2'-O-methyl ribonucleotide
  modified_base 3: mod_base = OTHER; note = 2'-fluoro ribonucleotide
  modified_base 4..6: mod_base = OTHER; note = 2'-O-methyl ribonucleotide
  modified_base 7..9: mod_base = OTHER; note = 2'-fluoro ribonucleotide
  modified_base 10..11: mod_base = OTHER; note = 2'-O-methyl ribonucleotide
  modified_base 12: mod_base = OTHER; note = 2'-fluoro ribonucleotide
  modified_base 13..16: mod_base = OTHER; note = 2'-O-methyl ribonucleotide
  modified_base 17: mod_base = OTHER; note = 2'-fluoro ribonucleotide
  modified_base 18..19: mod_base = OTHER; note = 2'-O-methyl ribonucleotide
  modified_base 20: mod_base = OTHER; note = inverted deoxythymidine
  modified_base 1..3: mod_base = OTHER; note = phosphorothioate linkage
  misc_feature 1..19: note = RNA
  misc_feature 20: note = DNA
gtaatatccaccagacctat

SEQ ID NO: 135 - DNA, 20 bp, synthetic construct
  source 1..20: mol_type = other DNA
  modified_base 1..2: mod_base = OTHER; note = 2'-O-methyl ribonucleotide
  modified_base 3: mod_base = OTHER; note = 2'-fluoro ribonucleotide
  modified_base 4..6: mod_base = OTHER; note = 2'-O-methyl ribonucleotide
  modified_base 7..9: mod_base = OTHER; note = 2'-fluoro ribonucleotide
  modified_base 10..11: mod_base = OTHER; note = 2'-O-methyl ribonucleotide
  modified_base 12: mod_base = OTHER; note = 2'-fluoro ribonucleotide
  modified_base 13..16: mod_base = OTHER; note = 2'-O-methyl ribonucleotide
  modified_base 17: mod_base = OTHER; note = 2'-fluoro ribonucleotide
  modified_base 18..19: mod_base = OTHER; note = 2'-O-methyl ribonucleotide
  modified_base 20: mod_base = OTHER; note = inverted deoxythymidine
  modified_base 1..3: mod_base = OTHER; note = phosphorothioate linkage
  misc_feature 1..19: note = RNA
  misc_feature 20: note = DNA
taatatccaccagaccttat

SEQ ID NO: 136 - DNA, 20 bp, synthetic construct
  source 1..20: mol_type = other DNA
  modified_base 1..2: mod_base = OTHER; note = 2'-O-methyl ribonucleotide
  modified_base 3: mod_base = OTHER; note = 2'-fluoro ribonucleotide
  modified_base 4..6: mod_base = OTHER; note = 2'-O-methyl ribonucleotide
  modified_base 7..9: mod_base = OTHER; note = 2'-fluoro ribonucleotide
  modified_base 10..11: mod_base = OTHER; note = 2'-O-methyl ribonucleotide
  modified_base 12: mod_base = OTHER; note = 2'-fluoro ribonucleotide
  modified_base 13..16: mod_base = OTHER; note = 2'-O-methyl ribonucleotide
  modified_base 17: mod_base = OTHER; note = 2'-fluoro ribonucleotide
  modified_base 18..19: mod_base = OTHER; note = 2'-O-methyl ribonucleotide
  modified_base 20: mod_base = OTHER; note = inverted deoxythymidine
  modified_base 1..3: mod_base = OTHER; note = phosphorothioate linkage
  misc_feature 1..19: note = RNA
  misc_feature 20: note = DNA
catggtggcttccctgcgat

SEQ ID NO: 137 - DNA, 20 bp, synthetic construct
  source 1..20: mol_type = other DNA
  modified_base 1..2: mod_base = OTHER; note = 2'-O-methyl ribonucleotide
  modified_base 3: mod_base = OTHER; note = 2'-fluoro ribonucleotide
  modified_base 4..6: mod_base = OTHER; note = 2'-O-methyl ribonucleotide
  modified_base 7..9: mod_base = OTHER; note = 2'-fluoro ribonucleotide
  modified_base 10..11: mod_base = OTHER; note = 2'-O-methyl ribonucleotide
  modified_base 12: mod_base = OTHER; note = 2'-fluoro ribonucleotide
  modified_base 13..16: mod_base = OTHER; note = 2'-O-methyl ribonucleotide
  modified_base 17: mod_base = OTHER; note = 2'-fluoro ribonucleotide
  modified_base 18..19: mod_base = OTHER; note = 2'-O-methyl ribonucleotide
  modified_base 20: mod_base = OTHER; note = inverted deoxythymidine
  modified_base 1..3: mod_base = OTHER; note = phosphorothioate linkage
  misc_feature 1..19: note = RNA
  misc_feature 20: note = DNA
tgcgcccaggaagccataat

SEQ ID NO: 138 - DNA, 20 bp, synthetic construct
  source 1..20: mol_type = other DNA
  modified_base 1..2: mod_base = OTHER; note = 2'-O-methyl ribonucleotide
  modified_base 3: mod_base = OTHER; note = 2'-fluoro ribonucleotide
  modified_base 4..6: mod_base = OTHER; note = 2'-O-methyl ribonucleotide
  modified_base 7..9: mod_base = OTHER; note = 2'-fluoro ribonucleotide
  modified_base 10..11: mod_base = OTHER; note = 2'-O-methyl ribonucleotide
  modified_base 12: mod_base = OTHER; note = 2'-fluoro ribonucleotide
  modified_base 13..16: mod_base = OTHER; note = 2'-O-methyl ribonucleotide
  modified_base 17: mod_base = OTHER; note = 2'-fluoro ribonucleotide
  modified_base 18..19: mod_base = OTHER; note = 2'-O-methyl ribonucleotide
  modified_base 20: mod_base = OTHER; note = inverted deoxythymidine
  modified_base 1..3: mod_base = OTHER; note = phosphorothioate linkage
  misc_feature 1..19: note = RNA
  misc_feature 20: note = DNA
cgcccaggaagccatataat

SEQ ID NO: 139 - DNA, 20 bp, synthetic construct
  source 1..20: mol_type = other DNA
  modified_base 1..2: mod_base = OTHER; note = 2'-O-methyl ribonucleotide
  modified_base 3: mod_base = OTHER; note = 2'-fluoro ribonucleotide
  modified_base 4..6: mod_base = OTHER; note = 2'-O-methyl ribonucleotide
  modified_base 7..9: mod_base = OTHER; note = 2'-fluoro ribonucleotide
  modified_base 10..11: mod_base = OTHER; note = 2'-O-methyl ribonucleotide
  modified_base 12: mod_base = OTHER; note = 2'-fluoro ribonucleotide
  modified_base 13..16: mod_base = OTHER; note = 2'-O-methyl ribonucleotide
  modified_base 17: mod_base = OTHER; note = 2'-fluoro ribonucleotide
  modified_base 18..19: mod_base = OTHER; note = 2'-O-methyl ribonucleotide
  modified_base 20: mod_base = OTHER; note = inverted deoxythymidine
  modified_base 1..3: mod_base = OTHER; note = phosphorothioate linkage
  misc_feature 1..19: note = RNA
  misc_feature 20: note = DNA
agccatatacacagatgcat

SEQ ID NO: 140 - DNA, 20 bp, synthetic construct
  source 1..20: mol_type = other DNA
  modified_base 1..2: mod_base = OTHER; note = 2'-O-methyl ribonucleotide
  modified_base 3: mod_base = OTHER; note = 2'-fluoro ribonucleotide
  modified_base 4..6: mod_base = OTHER; note = 2'-O-methyl ribonucleotide
  modified_base 7..9: mod_base = OTHER; note = 2'-fluoro ribonucleotide
  modified_base 10..11: mod_base = OTHER; note = 2'-O-methyl ribonucleotide
  modified_base 12: mod_base = OTHER; note = 2'-fluoro ribonucleotide
  modified_base 13..16: mod_base = OTHER; note = 2'-O-methyl ribonucleotide
  modified_base 17: mod_base = OTHER; note = 2'-fluoro ribonucleotide
  modified_base 18..19: mod_base = OTHER; note = 2'-O-methyl ribonucleotide
  modified_base 20: mod_base = OTHER; note = inverted deoxythymidine
  modified_base 1..3: mod_base = OTHER; note = phosphorothioate linkage
  misc_feature 1..19: note = RNA
  misc_feature 20: note = DNA
gccatatacacagatgccat

SEQ ID NO: 141 - DNA, 20 bp, synthetic construct
  source 1..20: mol_type = other DNA
  modified_base 1..2: mod_base = OTHER; note = 2'-O-methyl ribonucleotide
  modified_base 3: mod_base = OTHER; note = 2'-fluoro ribonucleotide
  modified_base 4..6: mod_base = OTHER; note = 2'-O-methyl ribonucleotide
  modified_base 7..9: mod_base = OTHER; note = 2'-fluoro ribonucleotide
  modified_base 10..11: mod_base = OTHER; note = 2'-O-methyl ribonucleotide
  modified_base 12: mod_base = OTHER; note = 2'-fluoro ribonucleotide
  modified_base 13..16: mod_base = OTHER; note = 2'-O-methyl ribonucleotide
  modified_base 17: mod_base = OTHER; note = 2'-fluoro ribonucleotide
  modified_base 18..19: mod_base = OTHER; note = 2'-O-methyl ribonucleotide
  modified_base 20: mod_base = OTHER; note = inverted deoxythymidine
  modified_base 1..3: mod_base = OTHER; note = phosphorothioate linkage
  misc_feature 1..19: note = RNA
  misc_feature 20: note = DNA
ttgtttgtgatagtgaacat

SEQ ID NO: 142 - DNA, 20 bp, synthetic construct
  source 1..20: mol_type = other DNA
  modified_base 1..2: mod_base = OTHER; note = 2'-O-methyl ribonucleotide
  modified_base 3: mod_base = OTHER; note = 2'-fluoro ribonucleotide
  modified_base 4..6: mod_base = OTHER; note = 2'-O-methyl ribonucleotide
  modified_base 7..9: mod_base = OTHER; note = 2'-fluoro ribonucleotide
  modified_base 10..11: mod_base = OTHER; note = 2'-O-methyl ribonucleotide
  modified_base 12: mod_base = OTHER; note = 2'-fluoro ribonucleotide
  modified_base 13..16: mod_base = OTHER; note = 2'-O-methyl ribonucleotide
  modified_base 17: mod_base = OTHER; note = 2'-fluoro ribonucleotide
  modified_base 18..19: mod_base = OTHER; note = 2'-O-methyl ribonucleotide
  modified_base 20: mod_base = OTHER; note = inverted deoxythymidine
  modified_base 1..3: mod_base = OTHER; note = phosphorothioate linkage
  misc_feature 1..19: note = RNA
  misc_feature 20: note = DNA
ggaagctgcttaactgtcat

SEQ ID NO: 143 - DNA, 20 bp, synthetic construct
  source 1..20: mol_type = other DNA
  modified_base 1..2: mod_base = OTHER; note = 2'-O-methyl ribonucleotide
  modified_base 3: mod_base = OTHER; note = 2'-fluoro ribonucleotide
  modified_base 4..6: mod_base = OTHER; note = 2'-O-methyl ribonucleotide
  modified_base 7..9: mod_base = OTHER; note = 2'-fluoro ribonucleotide
  modified_base 10..11: mod_base = OTHER; note = 2'-O-methyl ribonucleotide
  modified_base 12: mod_base = OTHER; note = 2'-fluoro ribonucleotide
  modified_base 13..16: mod_base = OTHER; note = 2'-O-methyl ribonucleotide
  modified_base 17: mod_base = OTHER; note = 2'-fluoro ribonucleotide
  modified_base 18..19: mod_base = OTHER; note = 2'-O-methyl ribonucleotide
  modified_base 20: mod_base = OTHER; note = inverted deoxythymidine
  modified_base 1..3: mod_base = OTHER; note = phosphorothioate linkage
  misc_feature 1..19: note = RNA
  misc_feature 20: note = DNA
gctgcttaactgtccatcat

SEQ ID NO: 144 - DNA, 20 bp, synthetic construct
  source 1..20: mol_type = other DNA
  modified_base 1..2: mod_base = OTHER; note = 2'-O-methyl ribonucleotide
  modified_base 3: mod_base = OTHER; note = 2'-fluoro ribonucleotide
  modified_base 4..6: mod_base = OTHER; note = 2'-O-methyl ribonucleotide
  modified_base 7..9: mod_base = OTHER; note = 2'-fluoro ribonucleotide
  modified_base 10..11: mod_base = OTHER; note = 2'-O-methyl ribonucleotide
  modified_base 12: mod_base = OTHER; note = 2'-fluoro ribonucleotide
  modified_base 13..16: mod_base = OTHER; note = 2'-O-methyl ribonucleotide
  modified_base 17: mod_base = OTHER; note = 2'-fluoro ribonucleotide
  modified_base 18..19: mod_base = OTHER; note = 2'-O-methyl ribonucleotide
  modified_base 20: mod_base = OTHER; note = inverted deoxythymidine
  modified_base 1..3: mod_base = OTHER; note = phosphorothioate linkage
  misc_feature 1..19: note = RNA
  misc_feature 20: note = DNA
agcaggagactggctaaaat

SEQ ID NO: 145 - DNA, 20 bp, synthetic construct
  source 1..20: mol_type = other DNA
  modified_base 1..2: mod_base = OTHER; note = 2'-O-methyl ribonucleotide
  modified_base 3: mod_base = OTHER; note = 2'-fluoro ribonucleotide
  modified_base 4..6: mod_base = OTHER; note = 2'-O-methyl ribonucleotide
  modified_base 7..9: mod_base = OTHER; note = 2'-fluoro ribonucleotide
  modified_base 10..11: mod_base = OTHER; note = 2'-O-methyl ribonucleotide
  modified_base 12: mod_base = OTHER; note = 2'-fluoro ribonucleotide
  modified_base 13..16: mod_base = OTHER; note = 2'-O-methyl ribonucleotide
  modified_base 17: mod_base = OTHER; note = 2'-fluoro ribonucleotide
  modified_base 18..19: mod_base = OTHER; note = 2'-O-methyl ribonucleotide
  modified_base 20: mod_base = OTHER; note = inverted deoxythymidine
  modified_base 1..3: mod_base = OTHER; note = phosphorothioate linkage
  misc_feature 1..19: note = RNA
  misc_feature 20: note = DNA
gcaggagactggctaaatat

SEQ ID NO: 146 - DNA, 20 bp, synthetic construct
  source 1..20: mol_type = other DNA
  modified_base 1..2: mod_base = OTHER; note = 2'-O-methyl ribonucleotide
  modified_base 3: mod_base = OTHER; note = 2'-fluoro ribonucleotide
  modified_base 4..6: mod_base = OTHER; note = 2'-O-methyl ribonucleotide
  modified_base 7..9: mod_base = OTHER; note = 2'-fluoro ribonucleotide
  modified_base 10..11: mod_base = OTHER; note = 2'-O-methyl ribonucleotide
  modified_base 12: mod_base = OTHER; note = 2'-fluoro ribonucleotide
  modified_base 13..16: mod_base = OTHER; note = 2'-O-methyl ribonucleotide
  modified_base 17: mod_base = OTHER; note = 2'-fluoro ribonucleotide
  modified_base 18..19: mod_base = OTHER; note = 2'-O-methyl ribonucleotide
  modified_base 20: mod_base = OTHER; note = inverted deoxythymidine
  modified_base 1..3: mod_base = OTHER; note = phosphorothioate linkage
  misc_feature 1..19: note = RNA
  misc_feature 20: note = DNA
caggagactggctaaataat

SEQ ID NO: 147 - DNA, 20 bp, synthetic construct
  source 1..20: mol_type = other DNA
  modified_base 1..2: mod_base = OTHER; note = 2'-O-methyl ribonucleotide
  modified_base 3: mod_base = OTHER; note = 2'-fluoro ribonucleotide
  modified_base 4..6: mod_base = OTHER; note = 2'-O-methyl ribonucleotide
  modified_base 7..9: mod_base = OTHER; note = 2'-fluoro ribonucleotide
  modified_base 10..11: mod_base = OTHER; note = 2'-O-methyl ribonucleotide
  modified_base 12: mod_base = OTHER; note = 2'-fluoro ribonucleotide
  modified_base 13..16: mod_base = OTHER; note = 2'-O-methyl ribonucleotide
  modified_base 17: mod_base = OTHER; note = 2'-fluoro ribonucleotide
  modified_base 18..19: mod_base = OTHER; note = 2'-O-methyl ribonucleotide
  modified_base 20: mod_base = OTHER; note = inverted deoxythymidine
  modified_base 1..3: mod_base = OTHER; note = phosphorothioate linkage
  misc_feature 1..19: note = RNA
  misc_feature 20: note = DNA
atacaacagaatctcaaaat

SEQ ID NO: 148 - DNA, 20 bp, synthetic construct
  source 1..20: mol_type = other DNA
  modified_base 1..2: mod_base = OTHER; note = 2'-O-methyl ribonucleotide
  modified_base 3: mod_base = OTHER; note = 2'-fluoro ribonucleotide
  modified_base 4..6: mod_base = OTHER; note = 2'-O-methyl ribonucleotide
  modified_base 7..9: mod_base = OTHER; note = 2'-fluoro ribonucleotide
  modified_base 10..11: mod_base = OTHER; note = 2'-O-methyl ribonucleotide
  modified_base 12: mod_base = OTHER; note = 2'-fluoro ribonucleotide
  modified_base 13..16: mod_base = OTHER; note = 2'-O-methyl ribonucleotide
  modified_base 17: mod_base = OTHER; note = 2'-fluoro ribonucleotide
  modified_base 18..19: mod_base = OTHER; note = 2'-O-methyl ribonucleotide
  modified_base 20: mod_base = OTHER; note = inverted deoxythymidine
  modified_base 1..3: mod_base = OTHER; note = phosphorothioate linkage
  misc_feature 1..19: note = RNA
  misc_feature 20: note = DNA
cagaaaacccacagctcgat

SEQ ID NO: 149 - DNA, 20 bp, synthetic construct
  source 1..20: mol_type = other DNA
  modified_base 1..2: mod_base = OTHER; note = 2'-O-methyl ribonucleotide
  modified_base 3: mod_base = OTHER; note = 2'-fluoro ribonucleotide
  modified_base 4..6: mod_base = OTHER; note = 2'-O-methyl ribonucleotide
  modified_base 7..9: mod_base = OTHER; note = 2'-fluoro ribonucleotide
  modified_base 10..11: mod_base = OTHER; note = 2'-O-methyl ribonucleotide
  modified_base 12: mod_base = OTHER; note = 2'-fluoro ribonucleotide
  modified_base 13..16: mod_base = OTHER; note = 2'-O-methyl ribonucleotide
  modified_base 17: mod_base = OTHER; note = 2'-fluoro ribonucleotide
  modified_base 18..19: mod_base = OTHER; note = 2'-O-methyl ribonucleotide
  modified_base 20: mod_base = OTHER; note = inverted deoxythymidine
  modified_base 1..3: mod_base = OTHER; note = phosphorothioate linkage
  misc_feature 1..19: note = RNA
  misc_feature 20: note = DNA
acccacagctcgaagagtat

SEQ ID NO: 150 - DNA, 20 bp, synthetic construct
  source 1..20: mol_type = other DNA
  modified_base 1..2: mod_base = OTHER; note = 2'-O-methyl ribonucleotide
  modified_base 3: mod_base = OTHER; note = 2'-fluoro ribonucleotide
  modified_base 4..6: mod_base = OTHER; note = 2'-O-methyl ribonucleotide
  modified_base 7..9: mod_base = OTHER; note = 2'-fluoro ribonucleotide
  modified_base 10..11: mod_base = OTHER; note = 2'-O-methyl ribonucleotide
  modified_base 12: mod_base = OTHER; note = 2'-fluoro ribonucleotide
  modified_base 13..16: mod_base = OTHER; note = 2'-O-methyl ribonucleotide
  modified_base 17: mod_base = OTHER; note = 2'-fluoro ribonucleotide
  modified_base 18..19: mod_base = OTHER; note = 2'-O-methyl ribonucleotide
  modified_base 20: mod_base = OTHER; note = inverted deoxythymidine
  modified_base 1..3: mod_base = OTHER; note = phosphorothioate linkage
  misc_feature 1..19: note = RNA
  misc_feature 20: note = DNA
gctcgaagagtggtgacgat

SEQ ID NO: 151 - DNA, 20 bp, synthetic construct
  source 1..20: mol_type = other DNA
  modified_base 1..2: mod_base = OTHER; note = 2'-O-methyl ribonucleotide
  modified_base 3: mod_base = OTHER; note = 2'-fluoro ribonucleotide
  modified_base 4..6: mod_base = OTHER; note = 2'-O-methyl ribonucleotide
  modified_base 7..9: mod_base = OTHER; note = 2'-fluoro ribonucleotide
  modified_base 10..11: mod_base = OTHER; note = 2'-O-methyl ribonucleotide
  modified_base 12: mod_base = OTHER; note = 2'-fluoro ribonucleotide
  modified_base 13..16: mod_base = OTHER; note = 2'-O-methyl ribonucleotide
  modified_base 17: mod_base = OTHER; note = 2'-fluoro ribonucleotide
  modified_base 18..19: mod_base = OTHER; note = 2'-O-methyl ribonucleotide
  modified_base 20: mod_base = OTHER; note = inverted deoxythymidine
  modified_base 1..3: mod_base = OTHER; note = phosphorothioate linkage
  misc_feature 1..19: note = RNA
  misc_feature 20: note = DNA
tcgaagagtggtgacgtcat

SEQ ID NO: 152 - DNA, 20 bp, synthetic construct
  source 1..20: mol_type = other DNA
  modified_base 1..2: mod_base = OTHER; note = 2'-O-methyl ribonucleotide
  modified_base 3: mod_base = OTHER; note = 2'-fluoro ribonucleotide
  modified_base 4..6: mod_base = OTHER; note = 2'-O-methyl ribonucleotide
  modified_base 7..9: mod_base = OTHER; note = 2'-fluoro ribonucleotide
  modified_base 10..11: mod_base = OTHER; note = 2'-O-methyl ribonucleotide
  modified_base 12: mod_base = OTHER; note = 2'-fluoro ribonucleotide
  modified_base 13..16: mod_base = OTHER; note = 2'-O-methyl ribonucleotide
  modified_base 17: mod_base = OTHER; note = 2'-fluoro ribonucleotide
  modified_base 18..19: mod_base = OTHER; note = 2'-O-methyl ribonucleotide
  modified_base 20: mod_base = OTHER; note = inverted deoxythymidine
  modified_base 1..3: mod_base = OTHER; note = phosphorothioate linkage
  misc_feature 1..19: note = RNA
  misc_feature 20: note = DNA
gaagagtggtgacgtctgat

SEQ ID NO: 153 - DNA, 20 bp, synthetic construct
  source 1..20: mol_type = other DNA
  modified_base 1..2: mod_base = OTHER; note = 2'-O-methyl ribonucleotide
  modified_base 3: mod_base = OTHER; note = 2'-fluoro ribonucleotide
  modified_base 4..6: mod_base = OTHER; note = 2'-O-methyl ribonucleotide
  modified_base 7..9: mod_base = OTHER; note = 2'-fluoro ribonucleotide
  modified_base 10..11: mod_base = OTHER; note = 2'-O-methyl ribonucleotide
  modified_base 12: mod_base = OTHER; note = 2'-fluoro ribonucleotide
  modified_base 13..16: mod_base = OTHER; note = 2'-O-methyl ribonucleotide
  modified_base 17: mod_base = OTHER; note = 2'-fluoro ribonucleotide
  modified_base 18..19: mod_base = OTHER; note = 2'-O-methyl ribonucleotide
  modified_base 20: mod_base = OTHER; note = inverted deoxythymidine
  modified_base 1..3: mod_base = OTHER; note = phosphorothioate linkage
  misc_feature 1..19: note = RNA
  misc_feature 20: note = DNA
ggttggttaaagggagatat

SEQ ID NO: 154 - DNA, 20 bp, synthetic construct
  source 1..20: mol_type = other DNA
  modified_base 1..2: mod_base = OTHER; note = 2'-O-methyl ribonucleotide
  modified_base 3: mod_base = OTHER; note = 2'-fluoro ribonucleotide
  modified_base 4..6: mod_base = OTHER; note = 2'-O-methyl ribonucleotide
  modified_base 7..9: mod_base = OTHER; note = 2'-fluoro ribonucleotide
  modified_base 10..11: mod_base = OTHER; note = 2'-O-methyl ribonucleotide
  modified_base 12: mod_base = OTHER; note = 2'-fluoro ribonucleotide
  modified_base 13..16: mod_base = OTHER; note = 2'-O-methyl ribonucleotide
  modified_base 17: mod_base = OTHER; note = 2'-fluoro ribonucleotide
  modified_base 18..19: mod_base = OTHER; note = 2'-O-methyl ribonucleotide
  modified_base 20: mod_base = OTHER; note = inverted deoxythymidine
  modified_base 1..3: mod_base = OTHER; note = phosphorothioate linkage
  misc_feature 1..19: note = RNA
  misc_feature 20: note = DNA
ttggctttcccataatgcat

SEQ ID NO: 155 - DNA, 20 bp, synthetic construct
  source 1..20: mol_type = other DNA
  modified_base 1..2: mod_base = OTHER; note = 2'-O-methyl ribonucleotide
  modified_base 3: mod_base = OTHER; note = 2'-fluoro ribonucleotide
  modified_base 4..6: mod_base = OTHER; note = 2'-O-methyl ribonucleotide
  modified_base 7..9: mod_base = OTHER; note = 2'-fluoro ribonucleotide
  modified_base 10..11: mod_base = OTHER; note = 2'-O-methyl ribonucleotide
  modified_base 12: mod_base = OTHER; note = 2'-fluoro ribonucleotide
  modified_base 13..16: mod_base = OTHER; note = 2'-O-methyl ribonucleotide
  modified_base 17: mod_base = OTHER; note = 2'-fluoro ribonucleotide
  modified_base 18..19: mod_base = OTHER; note = 2'-O-methyl ribonucleotide
  modified_base 20: mod_base = OTHER; note = inverted deoxythymidine
  modified_base 1..3: mod_base = OTHER; note = phosphorothioate linkage
  misc_feature 1..19: note = RNA
  misc_feature 20: note = DNA
ccctgcccagtcggcttcat

SEQ ID NO: 156 - DNA, 20 bp, synthetic construct
  source 1..20: mol_type = other DNA
  modified_base 1..2: mod_base = OTHER; note = 2'-O-methyl ribonucleotide
  modified_base 3: mod_base = OTHER; note = 2'-fluoro ribonucleotide
  modified_base 4..6: mod_base = OTHER; note = 2'-O-methyl ribonucleotide
  modified_base 7..9: mod_base = OTHER; note = 2'-fluoro ribonucleotide
  modified_base 10..11: mod_base = OTHER; note = 2'-O-methyl ribonucleotide
  modified_base 12: mod_base = OTHER; note = 2'-fluoro ribonucleotide
  modified_base 13..16: mod_base = OTHER; note = 2'-O-methyl ribonucleotide
  modified_base 17: mod_base = OTHER; note = 2'-fluoro ribonucleotide
  modified_base 18..19: mod_base = OTHER; note = 2'-O-methyl ribonucleotide
  modified_base 20: mod_base = OTHER; note = inverted deoxythymidine
  modified_base 1..3: mod_base = OTHER; note = phosphorothioate linkage
  misc_feature 1..19: note = RNA
  misc_feature 20: note = DNA
cctgcccagtcggcttctat

SEQ ID NO: 157 - DNA, 20 bp, synthetic construct
  source 1..20: mol_type = other DNA
  modified_base 1..2: mod_base = OTHER; note = 2'-O-methyl ribonucleotide
  modified_base 3: mod_base = OTHER; note = 2'-fluoro ribonucleotide
  modified_base 4..6: mod_base = OTHER; note = 2'-O-methyl ribonucleotide
  modified_base 7..9: mod_base = OTHER; note = 2'-fluoro ribonucleotide
  modified_base 10..11: mod_base = OTHER; note = 2'-O-methyl ribonucleotide
  modified_base 12: mod_base = OTHER; note = 2'-fluoro ribonucleotide
  modified_base 13..16: mod_base = OTHER; note = 2'-O-methyl ribonucleotide
  modified_base 17: mod_base = OTHER; note = 2'-fluoro ribonucleotide
  modified_base 18..19: mod_base = OTHER; note = 2'-O-methyl ribonucleotide
  modified_base 20: mod_base = OTHER; note = inverted deoxythymidine
  modified_base 1..3: mod_base = OTHER; note = phosphorothioate linkage
  misc_feature 1..19: note = RNA
  misc_feature 20: note = DNA
tgcccagtcggcttcttcat

SEQ ID NO: 158 - DNA, 20 bp, synthetic construct
  source 1..20: mol_type = other DNA
  modified_base 1..2: mod_base = OTHER; note = 2'-O-methyl ribonucleotide
  modified_base 3: mod_base = OTHER; note = 2'-fluoro ribonucleotide
  modified_base 4..6: mod_base = OTHER; note = 2'-O-methyl ribonucleotide
  modified_base 7..9: mod_base = OTHER; note = 2'-fluoro ribonucleotide
  modified_base 10..11: mod_base = OTHER; note = 2'-O-methyl ribonucleotide
  modified_base 12: mod_base = OTHER; note = 2'-fluoro ribonucleotide
  modified_base 13..16: mod_base = OTHER; note = 2'-O-methyl ribonucleotide
  modified_base 17: mod_base = OTHER; note = 2'-fluoro ribonucleotide
  modified_base 18..19: mod_base = OTHER; note = 2'-O-methyl ribonucleotide
  modified_base 20: mod_base = OTHER; note = inverted deoxythymidine
  modified_base 1..3: mod_base = OTHER; note = phosphorothioate linkage
  misc_feature 1..19: note = RNA
  misc_feature 20: note = DNA
gcccagtcggcttcttctat

SEQ ID NO: 159 - DNA, 20 bp, synthetic construct
  source 1..20: mol_type = other DNA
  modified_base 1..2: mod_base = OTHER; note = 2'-O-methyl ribonucleotide
  modified_base 3: mod_base = OTHER; note = 2'-fluoro ribonucleotide
  modified_base 4..6: mod_base = OTHER; note = 2'-O-methyl ribonucleotide
  modified_base 7..9: mod_base = OTHER; note = 2'-fluoro ribonucleotide
  modified_base 10..11: mod_base = OTHER; note = 2'-O-methyl ribonucleotide
  modified_base 12: mod_base = OTHER; note = 2'-fluoro ribonucleotide
  modified_base 13..16: mod_base = OTHER; note = 2'-O-methyl ribonucleotide
  modified_base 17: mod_base = OTHER; note = 2'-fluoro ribonucleotide
  modified_base 18..19: mod_base = OTHER; note = 2'-O-methyl ribonucleotide
  modified_base 20: mod_base = OTHER; note = inverted deoxythymidine
  modified_base 1..3: mod_base = OTHER; note = phosphorothioate linkage
  misc_feature 1..19: note = RNA
  misc_feature 20: note = DNA
ccagtcggcttcttctccat

SEQ ID NO: 160 - DNA, 20 bp, synthetic construct
  source 1..20: mol_type = other DNA
  modified_base 1..2: mod_base = OTHER; note = 2'-O-methyl ribonucleotide
  modified_base 3: mod_base = OTHER; note = 2'-fluoro ribonucleotide
  modified_base 4..6: mod_base = OTHER; note = 2'-O-methyl ribonucleotide
  modified_base 7..9: mod_base = OTHER; note = 2'-fluoro ribonucleotide
  modified_base 10..11: mod_base = OTHER; note = 2'-O-methyl ribonucleotide
  modified_base 12: mod_base = OTHER; note = 2'-fluoro ribonucleotide
  modified_base 13..16: mod_base = OTHER; note = 2'-O-methyl ribonucleotide
  modified_base 17: mod_base = OTHER; note = 2'-fluoro ribonucleotide
  modified_base 18..19: mod_base = OTHER; note = 2'-O-methyl ribonucleotide
  modified_base 20: mod_base = OTHER; note = inverted deoxythymidine
  modified_base 1..3: mod_base = OTHER; note = phosphorothioate linkage
  misc_feature 1..19: note = RNA
  misc_feature 20: note = DNA
cagtcggcttcttctccaat

SEQ ID NO: 161 - DNA, 20 bp, synthetic construct
  source 1..20: mol_type = other DNA
  modified_base 1..2: mod_base = OTHER; note = 2'-O-methyl ribonucleotide
  modified_base 3: mod_base = OTHER; note = 2'-fluoro ribonucleotide
  modified_base 4..6: mod_base = OTHER; note = 2'-O-methyl ribonucleotide
  modified_base 7..9: mod_base = OTHER; note = 2'-fluoro ribonucleotide
  modified_base 10..11: mod_base = OTHER; note = 2'-O-methyl ribonucleotide
  modified_base 12: mod_base = OTHER; note = 2'-fluoro ribonucleotide
  modified_base 13..16: mod_base = OTHER; note = 2'-O-methyl ribonucleotide
  modified_base 17: mod_base = OTHER; note = 2'-fluoro ribonucleotide
  modified_base 18..19: mod_base = OTHER; note = 2'-O-methyl ribonucleotide
  modified_base 20: mod_base = OTHER; note = inverted deoxythymidine
  modified_base 1..3: mod_base = OTHER; note = phosphorothioate linkage
  misc_feature 1..19: note = RNA
  misc_feature 20: note = DNA
agtcggcttcttctccaaat

SEQ ID NO: 162 - DNA, 20 bp, synthetic construct
  source 1..20: mol_type = other DNA
  modified_base 1..2: mod_base = OTHER; note = 2'-O-methyl ribonucleotide
  modified_base 3: mod_base = OTHER; note = 2'-fluoro ribonucleotide
  modified_base 4..6: mod_base = OTHER; note = 2'-O-methyl ribonucleotide
  modified_base 7..9: mod_base = OTHER; note = 2'-fluoro ribonucleotide
  modified_base 10..11: mod_base = OTHER; note = 2'-O-methyl ribonucleotide
  modified_base 12: mod_base = OTHER; note = 2'-fluoro ribonucleotide
  modified_base 13..16: mod_base = OTHER; note = 2'-O-methyl ribonucleotide
  modified_base 17: mod_base = OTHER; note = 2'-fluoro ribonucleotide
  modified_base 18..19: mod_base = OTHER; note = 2'-O-methyl ribonucleotide
  modified_base 20: mod_base = OTHER; note = inverted deoxythymidine
  modified_base 1..3: mod_base = OTHER; note = phosphorothioate linkage
  misc_feature 1..19: note = RNA
  misc_feature 20: note = DNA
gctgctccagtgcaggagat

SEQ ID NO: 163 - DNA, 20 bp, synthetic construct
  source 1..20: mol_type = other DNA
  modified_base 1..2: mod_base = OTHER; note = 2'-O-methyl ribonucleotide
  modified_base 3: mod_base = OTHER; note = 2'-fluoro ribonucleotide
  modified_base 4..6: mod_base = OTHER; note = 2'-O-methyl ribonucleotide
  modified_base 7..9: mod_base = OTHER; note = 2'-fluoro ribonucleotide
  modified_base 10..11: mod_base = OTHER; note = 2'-O-methyl ribonucleotide
  modified_base 12: mod_base = OTHER; note = 2'-fluoro ribonucleotide
  modified_base 13..16: mod_base = OTHER; note = 2'-O-methyl ribonucleotide
  modified_base 17: mod_base = OTHER; note = 2'-fluoro ribonucleotide
  modified_base 18..19: mod_base = OTHER; note = 2'-O-methyl ribonucleotide
  modified_base 20: mod_base = OTHER; note = inverted deoxythymidine
  modified_base 1..3: mod_base = OTHER; note = phosphorothioate linkage
  misc_feature 1..19: note = RNA
  misc_feature 20: note = DNA
ctgctccagtgcaggagaat

SEQ ID NO: 164 - DNA, 20 bp, synthetic construct
  source 1..20: mol_type = other DNA
  modified_base 1..2: mod_base = OTHER; note = 2'-O-methyl ribonucleotide
  modified_base 3: mod_base = OTHER; note = 2'-fluoro ribonucleotide
  modified_base 4..6: mod_base = OTHER; note = 2'-O-methyl ribonucleotide
  modified_base 7..9: mod_base = OTHER; note = 2'-fluoro ribonucleotide
  modified_base 10..11: mod_base = OTHER; note = 2'-O-methyl ribonucleotide
  modified_base 12: mod_base = OTHER; note = 2'-fluoro ribonucleotide
  modified_base 13..16: mod_base = OTHER; note = 2'-O-methyl ribonucleotide
  modified_base 17: mod_base = OTHER; note = 2'-fluoro ribonucleotide
  modified_base 18..19: mod_base = OTHER; note = 2'-O-methyl ribonucleotide
  modified_base 20: mod_base = OTHER; note = inverted deoxythymidine
  modified_base 1..3: mod_base = OTHER; note = phosphorothioate linkage
  misc_feature 1..19: note = RNA
  misc_feature 20: note = DNA
agtcgcatctcagtgcagat

SEQ ID NO: 165 - DNA, 20 bp, synthetic construct
  source 1..20: mol_type = other DNA
  modified_base 1..2: mod_base = OTHER; note = 2'-O-methyl ribonucleotide
  modified_base 3: mod_base = OTHER; note = 2'-fluoro ribonucleotide
  modified_base 4..6: mod_base = OTHER; note = 2'-O-methyl ribonucleotide
  modified_base 7..9: mod_base = OTHER; note = 2'-fluoro ribonucleotide
  modified_base 10..11: mod_base = OTHER; note = 2'-O-methyl ribonucleotide
  modified_base 12: mod_base = OTHER; note = 2'-fluoro ribonucleotide
  modified_base 13..16: mod_base = OTHER; note = 2'-O-methyl ribonucleotide
  modified_base 17: mod_base = OTHER; note = 2'-fluoro ribonucleotide
  modified_base 18..19: mod_base = OTHER; note = 2'-O-methyl ribonucleotide
  modified_base 20: mod_base = OTHER; note = inverted deoxythymidine
  modified_base 1..3: mod_base = OTHER; note = phosphorothioate linkage
  misc_feature 1..19: note = RNA
  misc_feature 20: note = DNA
tcgcatctcagtgcaggaat

SEQ ID NO: 166 - DNA, 20 bp, synthetic construct
  source 1..20: mol_type = other DNA
  modified_base 1..2: mod_base = OTHER; note = 2'-O-methyl ribonucleotide
  modified_base 3: mod_base = OTHER; note = 2'-fluoro ribonucleotide
  modified_base 4..6: mod_base = OTHER; note = 2'-O-methyl ribonucleotide
  modified_base 7..9: mod_base = OTHER; note = 2'-fluoro ribonucleotide
  modified_base 10..11: mod_base = OTHER; note = 2'-O-methyl ribonucleotide
  modified_base 12: mod_base = OTHER; note = 2'-fluoro ribonucleotide
  modified_base 13..16: mod_base = OTHER; note = 2'-O-methyl ribonucleotide
  modified_base 17: mod_base = OTHER; note = 2'-fluoro ribonucleotide
  modified_base 18..19: mod_base = OTHER; note = 2'-O-methyl ribonucleotide
  modified_base 20: mod_base = OTHER; note = inverted deoxythymidine
  modified_base 1..3: mod_base = OTHER; note = phosphorothioate linkage
  misc_feature 1..19: note = RNA
  misc_feature 20: note = DNA
cccagtcggcttcttctcat

SEQ ID NO: 167 - DNA, 22 bp, synthetic construct
  source 1..22: mol_type = other DNA
  modified_base 1..2: mod_base = OTHER; note = 2'-O-methyl ribonucleotide
  modified_base 3: mod_base = OTHER; note = 2'-fluoro ribonucleotide
  modified_base 4..6: mod_base = OTHER; note = 2'-O-methyl ribonucleotide
  modified_base 7..9: mod_base = OTHER; note = 2'-fluoro ribonucleotide
  modified_base 10..11: mod_base = OTHER; note = 2'-O-methyl ribonucleotide
  modified_base 12: mod_base = OTHER; note = 2'-fluoro ribonucleotide
  modified_base 13..16: mod_base = OTHER; note = 2'-O-methyl ribonucleotide
  modified_base 17: mod_base = OTHER; note = 2'-fluoro ribonucleotide
  modified_base 18..21: mod_base = OTHER; note = 2'-O-methyl ribonucleotide
  modified_base 22: mod_base = OTHER; note = inverted deoxythymidine
  modified_base 1..3: mod_base = OTHER; note = phosphorothioate linkage
  modified_base 20..22: mod_base = OTHER; note = phosphorothioate linkage
  misc_feature 1..21: note = RNA
  misc_feature 22: note = DNA
ccctgcccagtcggcttcattt

SEQ ID NO: 168 - DNA, 22 bp, synthetic construct
  source 1..22: mol_type = other DNA
  modified_base 1..2: mod_base = OTHER; note = 2'-O-methyl ribonucleotide
  modified_base 3: mod_base = OTHER; note = 2'-fluoro ribonucleotide
  modified_base 4..6: mod_base = OTHER; note = 2'-O-methyl ribonucleotide
  modified_base 7..9: mod_base = OTHER; note = 2'-fluoro ribonucleotide
  modified_base 10..11: mod_base = OTHER; note = 2'-O-methyl ribonucleotide
  modified_base 12: mod_base = OTHER; note = 2'-fluoro ribonucleotide
  modified_base 13..16: mod_base = OTHER; note = 2'-O-methyl ribonucleotide
  modified_base 17: mod_base = OTHER; note = 2'-fluoro ribonucleotide
  modified_base 18..21: mod_base = OTHER; note = 2'-O-methyl ribonucleotide
  modified_base 22: mod_base = OTHER; note = inverted deoxythymidine
  modified_base 1..3: mod_base = OTHER; note = phosphorothioate linkage
  modified_base 20..22: mod_base = OTHER; note = phosphorothioate linkage
  misc_feature 1..21: note = RNA
  misc_feature 22: note = DNA
cctgcccagtcggcttctattt

SEQ ID NO: 169 - DNA, 22 bp, synthetic construct
  source 1..22: mol_type = other DNA
  modified_base 1..2: mod_base = OTHER; note = 2'-O-methyl ribonucleotide
  modified_base 3: mod_base = OTHER; note = 2'-fluoro ribonucleotide
  modified_base 4..6: mod_base = OTHER; note = 2'-O-methyl ribonucleotide
  modified_base 7..9: mod_base = OTHER; note = 2'-fluoro ribonucleotide
  modified_base 10..11: mod_base = OTHER; note = 2'-O-methyl ribonucleotide
  modified_base 12: mod_base = OTHER; note = 2'-fluoro ribonucleotide
  modified_base 13..16: mod_base = OTHER; note = 2'-O-methyl ribonucleotide
  modified_base 17: mod_base = OTHER; note = 2'-fluoro ribonucleotide
  modified_base 18..21: mod_base = OTHER; note = 2'-O-methyl ribonucleotide
  modified_base 22: mod_base = OTHER; note = inverted deoxythymidine
  modified_base 1..3: mod_base = OTHER; note = phosphorothioate linkage
  modified_base 20..22: mod_base = OTHER; note = phosphorothioate linkage
  misc_feature 1..21: note = RNA
  misc_feature 22: note = DNA
tgcccagtcggcttcttcattt

SEQ ID NO: 170 - DNA, 22 bp, synthetic construct
  source 1..22: mol_type = other DNA
  modified_base 1..2: mod_base = OTHER; note = 2'-O-methyl ribonucleotide
  modified_base 3: mod_base = OTHER; note = 2'-fluoro ribonucleotide
  modified_base 4..6: mod_base = OTHER; note = 2'-O-methyl ribonucleotide
  modified_base 7..9: mod_base = OTHER; note = 2'-fluoro ribonucleotide
  modified_base 10..11: mod_base = OTHER; note = 2'-O-methyl ribonucleotide
  modified_base 12: mod_base = OTHER; note = 2'-fluoro ribonucleotide
  modified_base 13..16: mod_base = OTHER; note = 2'-O-methyl ribonucleotide
  modified_base 17: mod_base = OTHER; note = 2'-fluoro ribonucleotide
  modified_base 18..21: mod_base = OTHER; note = 2'-O-methyl ribonucleotide
  modified_base 22: mod_base = OTHER; note = inverted deoxythymidine
  modified_base 1..3: mod_base = OTHER; note = phosphorothioate linkage
  modified_base 20..22: mod_base = OTHER; note = phosphorothioate linkage
  misc_feature 1..21: note = RNA
  misc_feature 22: note = DNA
gcccagtcggcttcttctattt

SEQ ID NO: 171 - DNA, 22 bp, synthetic construct
  source 1..22: mol_type = other DNA
  modified_base 1..2: mod_base = OTHER; note = 2'-O-methyl ribonucleotide
  modified_base 3: mod_base = OTHER; note = 2'-fluoro ribonucleotide
  modified_base 4..6: mod_base = OTHER; note = 2'-O-methyl ribonucleotide
  modified_base 7..9: mod_base = OTHER; note = 2'-fluoro ribonucleotide
  modified_base 10..11: mod_base = OTHER; note = 2'-O-methyl ribonucleotide
  modified_base 12: mod_base = OTHER; note = 2'-fluoro ribonucleotide
  modified_base 13..16: mod_base = OTHER; note = 2'-O-methyl ribonucleotide
  modified_base 17: mod_base = OTHER; note = 2'-fluoro ribonucleotide
  modified_base 18..21: mod_base = OTHER; note = 2'-O-methyl ribonucleotide
  modified_base 22: mod_base = OTHER; note = inverted deoxythymidine
  modified_base 1..3: mod_base = OTHER; note = phosphorothioate linkage
  modified_base 20..22: mod_base = OTHER; note = phosphorothioate linkage
  misc_feature 1..21: note = RNA
  misc_feature 22: note = DNA
cccagtcggcttcttctcattt

SEQ ID NO: 172 - DNA, 22 bp, synthetic construct
  source 1..22: mol_type = other DNA
  modified_base 1..2: mod_base = OTHER; note = 2'-O-methyl ribonucleotide
  modified_base 3: mod_base = OTHER; note = 2'-fluoro ribonucleotide
  modified_base 4..6: mod_base = OTHER; note = 2'-O-methyl ribonucleotide
  modified_base 7..9: mod_base = OTHER; note = 2'-fluoro ribonucleotide
  modified_base 10..11: mod_base = OTHER; note = 2'-O-methyl ribonucleotide
  modified_base 12: mod_base = OTHER; note = 2'-fluoro ribonucleotide
  modified_base 13..16: mod_base = OTHER; note = 2'-O-methyl ribonucleotide
  modified_base 17: mod_base = OTHER; note = 2'-fluoro ribonucleotide
  modified_base 18..21: mod_base = OTHER; note = 2'-O-methyl ribonucleotide
  modified_base 22: mod_base = OTHER; note = inverted deoxythymidine
  modified_base 1..3: mod_base = OTHER; note = phosphorothioate linkage
  modified_base 20..22: mod_base = OTHER; note = phosphorothioate linkage
  misc_feature 1..21: note = RNA
  misc_feature 22: note = DNA
ccagtcggcttcttctccattt

SEQ ID NO: 173 - DNA, 22 bp, synthetic construct
  source 1..22: mol_type = other DNA
  modified_base 1..2: mod_base = OTHER; note = 2'-O-methyl ribonucleotide
  modified_base 3: mod_base = OTHER; note = 2'-fluoro ribonucleotide
  modified_base 4..6: mod_base = OTHER; note = 2'-O-methyl ribonucleotide
  modified_base 7..9: mod_base = OTHER; note = 2'-fluoro ribonucleotide
  modified_base 10..11: mod_base = OTHER; note = 2'-O-methyl ribonucleotide
  modified_base 12: mod_base = OTHER; note = 2'-fluoro ribonucleotide
  modified_base 13..16: mod_base = OTHER; note = 2'-O-methyl ribonucleotide
  modified_base 17: mod_base = OTHER; note = 2'-fluoro ribonucleotide
  modified_base 18..21: mod_base = OTHER; note = 2'-O-methyl ribonucleotide
  modified_base 22: mod_base = OTHER; note = inverted deoxythymidine
  modified_base 1..3: mod_base = OTHER; note = phosphorothioate linkage
  modified_base 20..22: mod_base = OTHER; note = phosphorothioate linkage
  misc_feature 1..21: note = RNA
  misc_feature 22: note = DNA
cagtcggcttcttctccaattt

SEQ ID NO: 174 - DNA, 22 bp, synthetic construct
  source 1..22: mol_type = other DNA
  modified_base 1..2: mod_base = OTHER; note = 2'-O-methyl ribonucleotide
  modified_base 3: mod_base = OTHER; note = 2'-fluoro ribonucleotide
  modified_base 4..6: mod_base = OTHER; note = 2'-O-methyl ribonucleotide
  modified_base 7..9: mod_base = OTHER; note = 2'-fluoro ribonucleotide
  modified_base 10..11: mod_base = OTHER; note = 2'-O-methyl ribonucleotide
  modified_base 12: mod_base = OTHER; note = 2'-fluoro ribonucleotide
  modified_base 13..16: mod_base = OTHER; note = 2'-O-methyl ribonucleotide
  modified_base 17: mod_base = OTHER; note = 2'-fluoro ribonucleotide
  modified_base 18..21: mod_base = OTHER; note = 2'-O-methyl ribonucleotide
  modified_base 22: mod_base = OTHER; note = inverted deoxythymidine
  modified_base 1..3: mod_base = OTHER; note = phosphorothioate linkage
  modified_base 20..22: mod_base = OTHER; note = phosphorothioate linkage
  misc_feature 1..21: note = RNA
  misc_feature 22: note = DNA
gctgctccagtgcaggagattt

SEQ ID NO: 175 - DNA, 22 bp, synthetic construct
  source 1..22: mol_type = other DNA
  modified_base 1..2: mod_base = OTHER; note = 2'-O-methyl ribonucleotide
  modified_base 3: mod_base = OTHER; note = 2'-fluoro ribonucleotide
  modified_base 4..6: mod_base = OTHER; note = 2'-O-methyl ribonucleotide
  modified_base 7..9: mod_base = OTHER; note = 2'-fluoro ribonucleotide
  modified_base 10..11: mod_base = OTHER; note = 2'-O-methyl ribonucleotide
  modified_base 12: mod_base = OTHER; note = 2'-fluoro ribonucleotide
  modified_base 13..16: mod_base = OTHER; note = 2'-O-methyl ribonucleotide
  modified_base 17: mod_base = OTHER; note = 2'-fluoro ribonucleotide
  modified_base 18..21: mod_base = OTHER; note = 2'-O-methyl ribonucleotide
  modified_base 22: mod_base = OTHER; note = inverted deoxythymidine
  modified_base 1..3: mod_base = OTHER; note = phosphorothioate linkage
  modified_base 20..22: mod_base = OTHER; note = phosphorothioate linkage
  misc_feature 1..21: note = RNA
  misc_feature 22: note = DNA
ctgctccagtgcaggagaattt

SEQ ID NO: 176 - DNA, 22 bp, synthetic construct
  source 1..22: mol_type = other DNA
  modified_base 1..2: mod_base = OTHER; note = 2'-O-methyl ribonucleotide
  modified_base 3: mod_base = OTHER; note = 2'-fluoro ribonucleotide
  modified_base 4..6: mod_base = OTHER; note = 2'-O-methyl ribonucleotide
  modified_base 7..9: mod_base = OTHER; note = 2'-fluoro ribonucleotide
  modified_base 10..11: mod_base = OTHER; note = 2'-O-methyl ribonucleotide
  modified_base 12: mod_base = OTHER; note = 2'-fluoro ribonucleotide
  modified_base 13..16: mod_base = OTHER; note = 2'-O-methyl ribonucleotide
  modified_base 17: mod_base = OTHER; note = 2'-fluoro ribonucleotide
  modified_base 18..21: mod_base = OTHER; note = 2'-O-methyl ribonucleotide
  modified_base 22: mod_base = OTHER; note = inverted deoxythymidine
  modified_base 1..3: mod_base = OTHER; note = phosphorothioate linkage
  modified_base 20..22: mod_base = OTHER; note = phosphorothioate linkage
  misc_feature 1..21: note = RNA
  misc_feature 22: note = DNA
agtcgcatctcagtgcagattt

SEQ ID NO: 177 - DNA, 22 bp, synthetic construct
  source 1..22: mol_type = other DNA
  modified_base 1..2: mod_base = OTHER; note = 2'-O-methyl ribonucleotide
  modified_base 3: mod_base = OTHER; note = 2'-fluoro ribonucleotide
  modified_base 4..6: mod_base = OTHER; note = 2'-O-methyl ribonucleotide
  modified_base 7..9: mod_base = OTHER; note = 2'-fluoro ribonucleotide
  modified_base 10..11: mod_base = OTHER; note = 2'-O-methyl ribonucleotide
  modified_base 12: mod_base = OTHER; note = 2'-fluoro ribonucleotide
  modified_base 13..16: mod_base = OTHER; note = 2'-O-methyl ribonucleotide
  modified_base 17: mod_base = OTHER; note = 2'-fluoro ribonucleotide
  modified_base 18..21: mod_base = OTHER; note = 2'-O-methyl ribonucleotide
  modified_base 22: mod_base = OTHER; note = inverted deoxythymidine
  modified_base 1..3: mod_base = OTHER; note = phosphorothioate linkage
  modified_base 20..22: mod_base = OTHER; note = phosphorothioate linkage
  misc_feature 1..21: note = RNA
  misc_feature 22: note = DNA
tcgcatctcagtgcaggaattt

SEQ ID NO: 178 - DNA, 22 bp, synthetic construct
  source 1..22: mol_type = other DNA
  modified_base 1..2: mod_base = OTHER; note = 2'-O-methyl ribonucleotide
  modified_base 3: mod_base = OTHER; note = 2'-fluoro ribonucleotide
  modified_base 4..6: mod_base = OTHER; note = 2'-O-methyl ribonucleotide
  modified_base 7..9: mod_base = OTHER; note = 2'-fluoro ribonucleotide
  modified_base 10..11: mod_base = OTHER; note = 2'-O-methyl ribonucleotide
  modified_base 12: mod_base = OTHER; note = 2'-fluoro ribonucleotide
  modified_base 13..16: mod_base = OTHER; note = 2'-O-methyl ribonucleotide
  modified_base 17: mod_base = OTHER; note = 2'-fluoro ribonucleotide
  modified_base 18..21: mod_base = OTHER; note = 2'-O-methyl ribonucleotide
  modified_base 22: mod_base = OTHER; note = inverted deoxythymidine
  modified_base 1..3: mod_base = OTHER; note = phosphorothioate linkage
  modified_base 20..22: mod_base = OTHER; note = phosphorothioate linkage
  misc_feature 1..21: note = RNA
  misc_feature 22: note = DNA
agtcggcttcttctccaaattt

SEQ ID NO: 179 - RNA, 21 nt, synthetic construct
  source 1..21: mol_type = other RNA
  modified_base 1..2: mod_base = OTHER; note = 2'-fluoro ribonucleotide
  modified_base 3..13: mod_base = OTHER; note = 2'-O-methyl ribonucleotide
  modified_base 14: mod_base = OTHER; note = 2'-fluoro ribonucleotide
  modified_base 15..21: mod_base = OTHER; note = 2'-O-methyl ribonucleotide
  modified_base 1..3: mod_base = OTHER; note = phosphorothioate linkage
  modified_base 19..21: mod_base = OTHER; note = phosphorothioate linkage
tcatgcagtgggtggttcttt

SEQ ID NO: 180 - RNA, 21 nt, synthetic construct
  source 1..21: mol_type = other RNA
  modified_base 1..2: mod_base = OTHER; note = 2'-fluoro ribonucleotide
  modified_base 3..13: mod_base = OTHER; note = 2'-O-methyl ribonucleotide
  modified_base 14: mod_base = OTHER; note = 2'-fluoro ribonucleotide
  modified_base 15..21: mod_base = OTHER; note = 2'-O-methyl ribonucleotide
  modified_base 1..3: mod_base = OTHER; note = phosphorothioate linkage
  modified_base 19..21: mod_base = OTHER; note = phosphorothioate linkage
tattaggtactgtttttcttt

SEQ ID NO: 181 - RNA, 21 nt, synthetic construct
  source 1..21: mol_type = other RNA
  modified_base 1..2: mod_base = OTHER; note = 2'-fluoro ribonucleotide
  modified_base 3..13: mod_base = OTHER; note = 2'-O-methyl ribonucleotide
  modified_base 14: mod_base = OTHER; note = 2'-fluoro ribonucleotide
  modified_base 15..21: mod_base = OTHER; note = 2'-O-methyl ribonucleotide
  modified_base 1..3: mod_base = OTHER; note = phosphorothioate linkage
  modified_base 19..21: mod_base = OTHER; note = phosphorothioate linkage
tcagtcactcaccagtttctt

SEQ ID NO: 182 - RNA, 21 nt, synthetic construct
  source 1..21: mol_type = other RNA
  modified_base 1..2: mod_base = OTHER; note = 2'-fluoro ribonucleotide
  modified_base 3..13: mod_base = OTHER; note = 2'-O-methyl ribonucleotide
  modified_base 14: mod_base = OTHER; note = 2'-fluoro ribonucleotide
  modified_base 15..21: mod_base = OTHER; note = 2'-O-methyl ribonucleotide
  modified_base 1..3: mod_base = OTHER; note = phosphorothioate linkage
  modified_base 19..21: mod_base = OTHER; note = phosphorothioate linkage
tgcagtcactcaccagttttt

SEQ ID NO: 183 - RNA, 21 nt, synthetic construct
  source 1..21: mol_type = other RNA
  modified_base 1..2: mod_base = OTHER; note = 2'-fluoro ribonucleotide
  modified_base 3..13: mod_base = OTHER; note = 2'-O-methyl ribonucleotide
  modified_base 14: mod_base = OTHER; note = 2'-fluoro ribonucleotide
  modified_base 15..21: mod_base = OTHER; note = 2'-O-methyl ribonucleotide
  modified_base 1..3: mod_base = OTHER; note = phosphorothioate linkage
  modified_base 19..21: mod_base = OTHER; note = phosphorothioate linkage
tattccgtttcagtgaacttt

SEQ ID NO: 184 - RNA, 21 nt, synthetic construct
  source 1..21: mol_type = other RNA
  modified_base 1..2: mod_base = OTHER; note = 2'-fluoro ribonucleotide
  modified_base 3..13: mod_base = OTHER; note = 2'-O-methyl ribonucleotide
  modified_base 14: mod_base = OTHER; note = 2'-fluoro ribonucleotide
  modified_base 15..21: mod_base = OTHER; note = 2'-O-methyl ribonucleotide
  modified_base 1..3: mod_base = OTHER; note = phosphorothioate linkage
  modified_base 19..21: mod_base = OTHER; note = phosphorothioate linkage
tccgcaaggaaggcattcctt

SEQ ID NO: 185 - RNA, 21 nt, synthetic construct
  source 1..21: mol_type = other RNA
  modified_base 1..2: mod_base = OTHER; note = 2'-fluoro ribonucleotide
  modified_base 3..13: mod_base = OTHER; note = 2'-O-methyl ribonucleotide
  modified_base 14: mod_base = OTHER; note = 2'-fluoro ribonucleotide
  modified_base 15..21: mod_base = OTHER; note = 2'-O-methyl ribonucleotide
  modified_base 1..3: mod_base = OTHER; note = phosphorothioate linkage
  modified_base 19..21: mod_base = OTHER; note = phosphorothioate linkage
tttcaccgcaaggaaggcatt

SEQ ID NO: 186 - RNA, 21 nt, synthetic construct
  source 1..21: mol_type = other RNA
  modified_base 1..2: mod_base = OTHER; note = 2'-fluoro ribonucleotide
  modified_base 3..13: mod_base = OTHER; note = 2'-O-methyl ribonucleotide
  modified_base 14: mod_base = OTHER; note = 2'-fluoro ribonucleotide
  modified_base 15..21: mod_base = OTHER; note = 2'-O-methyl ribonucleotide
  modified_base 1..3: mod_base = OTHER; note = phosphorothioate linkage
  modified_base 19..21: mod_base = OTHER; note = phosphorothioate linkage
ttttcaccgcaaggaaggctt

SEQ ID NO: 187 - RNA, 21 nt, synthetic construct
  source 1..21: mol_type = other RNA
  modified_base 1..2: mod_base = OTHER; note = 2'-fluoro ribonucleotide
  modified_base 3..13: mod_base = OTHER; note = 2'-O-methyl ribonucleotide
  modified_base 14: mod_base = OTHER; note = 2'-fluoro ribonucleotide
  modified_base 15..21: mod_base = OTHER; note = 2'-O-methyl ribonucleotide
  modified_base 1..3: mod_base = OTHER; note = phosphorothioate linkage
  modified_base 19..21: mod_base = OTHER; note = phosphorothioate linkage
tctttcaccgcaaggaaggtt

SEQ ID NO: 188 - RNA, 21 nt, synthetic construct
  source 1..21: mol_type = other RNA
  modified_base 1..2: mod_base = OTHER; note = 2'-fluoro ribonucleotide
  modified_base 3..13: mod_base = OTHER; note = 2'-O-methyl ribonucleotide
  modified_base 14: mod_base = OTHER; note = 2'-fluoro ribonucleotide
  modified_base 15..21: mod_base = OTHER; note = 2'-O-methyl ribonucleotide
  modified_base 1..3: mod_base = OTHER; note = phosphorothioate linkage
  modified_base 19..21: mod_base = OTHER; note = phosphorothioate linkage
tgctttcaccgcaaggaagtt

SEQ ID NO: 189 - RNA, 21 nt, synthetic construct
  source 1..21: mol_type = other RNA
  modified_base 1..2: mod_base = OTHER; note = 2'-fluoro ribonucleotide
  modified_base 3..13: mod_base = OTHER; note = 2'-O-methyl ribonucleotide
  modified_base 14: mod_base = OTHER; note = 2'-fluoro ribonucleotide
  modified_base 15..21: mod_base = OTHER; note = 2'-O-methyl ribonucleotide
  modified_base 1..3: mod_base = OTHER; note = phosphorothioate linkage
  modified_base 19..21: mod_base = OTHER; note = phosphorothioate linkage
tcgctttcaccgcaaggaatt

SEQ ID NO: 190 - RNA, 21 nt, synthetic construct
  source 1..21: mol_type = other RNA
  modified_base 1..2: mod_base = OTHER; note = 2'-fluoro ribonucleotide
  modified_base 3..13: mod_base = OTHER; note = 2'-O-methyl ribonucleotide
  modified_base 14: mod_base = OTHER; note = 2'-fluoro ribonucleotide
  modified_base 15..21: mod_base = OTHER; note = 2'-O-methyl ribonucleotide
  modified_base 1..3: mod_base = OTHER; note = phosphorothioate linkage
  modified_base 19..21: mod_base = OTHER; note = phosphorothioate linkage
ttcgctttcaccgcaaggatt

SEQ ID NO: 191 - RNA, 21 nt, synthetic construct
  source 1..21: mol_type = other RNA
  modified_base 1..2: mod_base = OTHER; note = 2'-fluoro ribonucleotide
  modified_base 3..13: mod_base = OTHER; note = 2'-O-methyl ribonucleotide
  modified_base 14: mod_base = OTHER; note = 2'-fluoro ribonucleotide
  modified_base 15..21: mod_base = OTHER; note = 2'-O-methyl ribonucleotide
  modified_base 1..3: mod_base = OTHER; note = phosphorothioate linkage
  modified_base 19..21: mod_base = OTHER; note = phosphorothioate linkage
tttcgctttcaccgcaaggtt

SEQ ID NO: 192 - RNA, 21 nt, synthetic construct
  source 1..21: mol_type = other RNA
  modified_base 1..2: mod_base = OTHER; note = 2'-fluoro ribonucleotide
  modified_base 3..13: mod_base = OTHER; note = 2'-O-methyl ribonucleotide
  modified_base 14: mod_base = OTHER; note = 2'-fluoro ribonucleotide
  modified_base 15..21: mod_base = OTHER; note = 2'-O-methyl ribonucleotide
  modified_base 1..3: mod_base = OTHER; note = phosphorothioate linkage
  modified_base 19..21: mod_base = OTHER; note = phosphorothioate linkage
tattcgctttcaccgcaagtt

SEQ ID NO: 193 - RNA, 21 nt, synthetic construct
  source 1..21: mol_type = other RNA
  modified_base 1..2: mod_base = OTHER; note = 2'-fluoro ribonucleotide
  modified_base 3..13: mod_base = OTHER; note = 2'-O-methyl ribonucleotide
  modified_base 14: mod_base = OTHER; note = 2'-fluoro ribonucleotide
  modified_base 15..21: mod_base = OTHER; note = 2'-O-methyl ribonucleotide
  modified_base 1..3: mod_base = OTHER; note = phosphorothioate linkage
  modified_base 19..21: mod_base = OTHER; note = phosphorothioate linkage
taattcgctttcaccgcaatt

SEQ ID NO: 194 - RNA, 21 nt, synthetic construct
  source 1..21: mol_type = other RNA
  modified_base 1..2: mod_base = OTHER; note = 2'-fluoro ribonucleotide
  modified_base 3..13: mod_base = OTHER; note = 2'-O-methyl ribonucleotide
  modified_base 14: mod_base = OTHER; note = 2'-fluoro ribonucleotide
  modified_base 15..21: mod_base = OTHER; note = 2'-O-methyl ribonucleotide
  modified_base 1..3: mod_base = OTHER; note = phosphorothioate linkage
  modified_base 19..21: mod_base = OTHER; note = phosphorothioate linkage
tgaattcgctttcaccgcatt

SEQ ID NO: 195 - RNA, 21 nt, synthetic construct
  source 1..21: mol_type = other RNA
  modified_base 1..2: mod_base = OTHER; note = 2'-fluoro ribonucleotide
  modified_base 3..13: mod_base = OTHER; note = 2'-O-methyl ribonucleotide
  modified_base 14: mod_base = OTHER; note = 2'-fluoro ribonucleotide
  modified_base 15..21: mod_base = OTHER; note = 2'-O-methyl ribonucleotide
  modified_base 1..3: mod_base = OTHER; note = phosphorothioate linkage
  modified_base 19..21: mod_base = OTHER; note = phosphorothioate linkage
taggaattcgctttcaccgtt

SEQ ID NO: 196 - RNA, 21 nt, synthetic construct
  source 1..21: mol_type = other RNA
  modified_base 1..2: mod_base = OTHER; note = 2'-fluoro ribonucleotide
  modified_base 3..13: mod_base = OTHER; note = 2'-O-methyl ribonucleotide
  modified_base 14: mod_base = OTHER; note = 2'-fluoro ribonucleotide
  modified_base 15..21: mod_base = OTHER; note = 2'-O-methyl ribonucleotide
  modified_base 1..3: mod_base = OTHER; note = phosphorothioate linkage
  modified_base 19..21: mod_base = OTHER; note = phosphorothioate linkage
ttaggaattcgctttcacctt

SEQ ID NO: 197 - RNA, 21 nt, synthetic construct
  source 1..21: mol_type = other RNA
  modified_base 1..2: mod_base = OTHER; note = 2'-fluoro ribonucleotide
  modified_base 3..13: mod_base = OTHER; note = 2'-O-methyl ribonucleotide
  modified_base 14: mod_base = OTHER; note = 2'-fluoro ribonucleotide
  modified_base 15..21: mod_base = OTHER; note = 2'-O-methyl ribonucleotide
  modified_base 1..3: mod_base = OTHER; note = phosphorothioate linkage
  modified_base 19..21: mod_base = OTHER; note = phosphorothioate linkage
ttctaggaattcgctttcatt

SEQ ID NO: 198 - RNA, 21 nt, synthetic construct
  source 1..21: mol_type = other RNA
  modified_base 1..2: mod_base = OTHER; note = 2'-fluoro ribonucleotide
  modified_base 3..13: mod_base = OTHER; note = 2'-O-methyl ribonucleotide
  modified_base 14: mod_base = OTHER; note = 2'-fluoro ribonucleotide
  modified_base 15..21: mod_base = OTHER; note = 2'-O-methyl ribonucleotide
  modified_base 1..3: mod_base = OTHER; note = phosphorothioate linkage
  modified_base 19..21: mod_base = OTHER; note = phosphorothioate linkage
tgtctaggaattcgctttctt

SEQ ID NO: 199 - RNA, 21 nt, synthetic construct
  source 1..21: mol_type = other RNA
  modified_base 1..2: mod_base = OTHER; note = 2'-fluoro ribonucleotide
  modified_base 3..13: mod_base = OTHER; note = 2'-O-methyl ribonucleotide
  modified_base 14: mod_base = OTHER; note = 2'-fluoro ribonucleotide
  modified_base 15..21: mod_base = OTHER; note = 2'-O-methyl ribonucleotide
  modified_base 1..3: mod_base = OTHER; note = phosphorothioate linkage
  modified_base 19..21: mod_base = OTHER; note = phosphorothioate linkage
ttgtctaggaattcgcttttt

SEQ ID NO: 200 - RNA, 21 nt, synthetic construct
  source 1..21: mol_type = other RNA
  modified_base 1..2: mod_base = OTHER; note = 2'-fluoro ribonucleotide
  modified_base 3..13: mod_base = OTHER; note = 2'-O-methyl ribonucleotide
  modified_base 14: mod_base = OTHER; note = 2'-fluoro ribonucleotide
  modified_base 15..21: mod_base = OTHER; note = 2'-O-methyl ribonucleotide
  modified_base 1..3: mod_base = OTHER; note = phosphorothioate linkage
  modified_base 19..21: mod_base = OTHER; note = phosphorothioate linkage
tgtgtctaggaattcgctttt

SEQ ID NO: 201 - RNA, 21 nt, synthetic construct
  source 1..21: mol_type = other RNA
  modified_base 1..2: mod_base = OTHER; note = 2'-fluoro ribonucleotide
  modified_base 3..13: mod_base = OTHER; note = 2'-O-methyl ribonucleotide
  modified_base 14: mod_base = OTHER; note = 2'-fluoro ribonucleotide
  modified_base 15..21: mod_base = OTHER; note = 2'-O-methyl ribonucleotide
  modified_base 1..3: mod_base = OTHER; note = phosphorothioate linkage
  modified_base 19..21: mod_base = OTHER; note = phosphorothioate linkage
tggtgtctaggaattcgcttt

SEQ ID NO: 202 - RNA, 21 nt, synthetic construct
  source 1..21: mol_type = other RNA
  modified_base 1..2: mod_base = OTHER; note = 2'-fluoro ribonucleotide
  modified_base 3..13: mod_base = OTHER; note = 2'-O-methyl ribonucleotide
  modified_base 14: mod_base = OTHER; note = 2'-fluoro ribonucleotide
  modified_base 15..21: mod_base = OTHER; note = 2'-O-methyl ribonucleotide
  modified_base 1..3: mod_base = OTHER; note = phosphorothioate linkage
  modified_base 19..21: mod_base = OTHER; note = phosphorothioate linkage
ttctgttccaggtgtctagtt

SEQ ID NO: 203 - RNA, 21 nt, synthetic construct
  source 1..21: mol_type = other RNA
  modified_base 1..2: mod_base = OTHER; note = 2'-fluoro ribonucleotide
  modified_base 3..13: mod_base = OTHER; note = 2'-O-methyl ribonucleotide
  modified_base 14: mod_base = OTHER; note = 2'-fluoro ribonucleotide
  modified_base 15..21: mod_base = OTHER; note = 2'-O-methyl ribonucleotide
  modified_base 1..3: mod_base = OTHER; note = phosphorothioate linkage
  modified_base 19..21: mod_base = OTHER; note = phosphorothioate linkage
tgtcgcagtatttgtgctgtt

SEQ ID NO: 204 - RNA, 21 nt, synthetic construct
  source 1..21: mol_type = other RNA
  modified_base 1..2: mod_base = OTHER; note = 2'-fluoro ribonucleotide
  modified_base 3..13: mod_base = OTHER; note = 2'-O-methyl ribonucleotide
  modified_base 14: mod_base = OTHER; note = 2'-fluoro ribonucleotide
  modified_base 15..21: mod_base = OTHER; note = 2'-O-methyl ribonucleotide
  modified_base 1..3: mod_base = OTHER; note = phosphorothioate linkage
  modified_base 19..21: mod_base = OTHER; note = phosphorothioate linkage
tggtcgcagtatttgtgcttt

SEQ ID NO: 205 - RNA, 21 nt, synthetic construct
  source 1..21: mol_type = other RNA
  modified_base 1..2: mod_base = OTHER; note = 2'-fluoro ribonucleotide
  modified_base 3..13: mod_base = OTHER; note = 2'-O-methyl ribonucleotide
  modified_base 14: mod_base = OTHER; note = 2'-fluoro ribonucleotide
  modified_base 15..21: mod_base = OTHER; note = 2'-O-methyl ribonucleotide
  modified_base 1..3: mod_base = OTHER; note = phosphorothioate linkage
  modified_base 19..21: mod_base = OTHER; note = phosphorothioate linkage
tgggtcgcagtatttgtgctt

SEQ ID NO: 206 - RNA, 21 nt, synthetic construct
  source 1..21: mol_type = other RNA
  modified_base 1..2: mod_base = OTHER; note = 2'-fluoro ribonucleotide
  modified_base 3..13: mod_base = OTHER; note = 2'-O-methyl ribonucleotide
  modified_base 14: mod_base = OTHER; note = 2'-fluoro ribonucleotide
  modified_base 15..21: mod_base = OTHER; note = 2'-O-methyl ribonucleotide
  modified_base 1..3: mod_base = OTHER; note = phosphorothioate linkage
  modified_base 19..21: mod_base = OTHER; note = phosphorothioate linkage
ttaggttggggtcgcagtatt

SEQ ID NO: 207 - RNA, 21 nt, synthetic construct
  source 1..21: mol_type = other RNA
  modified_base 1..2: mod_base = OTHER; note = 2'-fluoro ribonucleotide
  modified_base 3..13: mod_base = OTHER; note = 2'-O-methyl ribonucleotide
  modified_base 14: mod_base = OTHER; note = 2'-fluoro ribonucleotide
  modified_base 15..21: mod_base = OTHER; note = 2'-O-methyl ribonucleotide
  modified_base 1..3: mod_base = OTHER; note = phosphorothioate linkage
  modified_base 19..21: mod_base = OTHER; note = phosphorothioate linkage
tctaggttggggtcgcagttt

SEQ ID NO: 208 - RNA, 21 nt, synthetic construct
  source 1..21: mol_type = other RNA
  modified_base 1..2: mod_base = OTHER; note = 2'-fluoro ribonucleotide
  modified_base 3..13: mod_base = OTHER; note = 2'-O-methyl ribonucleotide
  modified_base 14: mod_base = OTHER; note = 2'-fluoro ribonucleotide
  modified_base 15..21: mod_base = OTHER; note = 2'-O-methyl ribonucleotide
  modified_base 1..3: mod_base = OTHER; note = phosphorothioate linkage
  modified_base 19..21: mod_base = OTHER; note = phosphorothioate linkage
tcctaggttggggtcgcagtt

SEQ ID NO: 209 - RNA, 21 nt, synthetic construct
  source 1..21: mol_type = other RNA
  modified_base 1..2: mod_base = OTHER; note = 2'-fluoro ribonucleotide
  modified_base 3..13: mod_base = OTHER; note = 2'-O-methyl ribonucleotide
  modified_base 14: mod_base = OTHER; note = 2'-fluoro ribonucleotide
  modified_base 15..21: mod_base = OTHER; note = 2'-O-methyl ribonucleotide
  modified_base 1..3: mod_base = OTHER; note = phosphorothioate linkage
  modified_base 19..21: mod_base = OTHER; note = phosphorothioate linkage
taagccctaggttggggtctt

SEQ ID NO: 210 - RNA, 21 nt, synthetic construct
  source 1..21: mol_type = other RNA
  modified_base 1..2: mod_base = OTHER; note = 2'-fluoro ribonucleotide
  modified_base 3..13: mod_base = OTHER; note = 2'-O-methyl ribonucleotide
  modified_base 14: mod_base = OTHER; note = 2'-fluoro ribonucleotide
  modified_base 15..21: mod_base = OTHER; note = 2'-O-methyl ribonucleotide
  modified_base 1..3: mod_base = OTHER; note = phosphorothioate linkage
  modified_base 19..21: mod_base = OTHER; note = phosphorothioate linkage
tgaagccctaggttggggttt

SEQ ID NO: 211 - RNA, 21 nt, synthetic construct
  source 1..21: mol_type = other RNA
  modified_base 1..2: mod_base = OTHER; note = 2'-fluoro ribonucleotide
  modified_base 3..13: mod_base = OTHER; note = 2'-O-methyl ribonucleotide
  modified_base 14: mod_base = OTHER; note = 2'-fluoro ribonucleotide
  modified_base 15..21: mod_base = OTHER; note = 2'-O-methyl ribonucleotide
  modified_base 1..3: mod_base = OTHER; note = phosphorothioate linkage
  modified_base 19..21: mod_base = OTHER; note = phosphorothioate linkage
tcgaagccctaggttggggtt

SEQ ID NO: 212 - RNA, 21 nt, synthetic construct
  source 1..21: mol_type = other RNA
  modified_base 1..2: mod_base = OTHER; note = 2'-fluoro ribonucleotide
  modified_base 3..13: mod_base = OTHER; note = 2'-O-methyl ribonucleotide
  modified_base 14: mod_base = OTHER; note = 2'-fluoro ribonucleotide
  modified_base 15..21: mod_base = OTHER; note = 2'-O-methyl ribonucleotide
  modified_base 1..3: mod_base = OTHER; note = phosphorothioate linkage
  modified_base 19..21: mod_base = OTHER; note = phosphorothioate linkage
ttggacccgaagccctaggtt

SEQ ID NO: 213 - RNA, 21 nt, synthetic construct
  source 1..21: mol_type = other RNA
  modified_base 1..2: mod_base = OTHER; note = 2'-fluoro ribonucleotide
  modified_base 3..13: mod_base = OTHER; note = 2'-O-methyl ribonucleotide
  modified_base 14: mod_base = OTHER; note = 2'-fluoro ribonucleotide
  modified_base 15..21: mod_base = OTHER; note = 2'-O-methyl ribonucleotide
  modified_base 1..3: mod_base = OTHER; note = phosphorothioate linkage
  modified_base 19..21: mod_base = OTHER; note = phosphorothioate linkage
tcccttctgctggacccgatt

SEQ ID NO: 214 - RNA, 21 nt, synthetic construct
  source 1..21: mol_type = other RNA
  modified_base 1..2: mod_base = OTHER; note = 2'-fluoro ribonucleotide
  modified_base 3..13: mod_base = OTHER; note = 2'-O-methyl ribonucleotide
  modified_base 14: mod_base = OTHER; note = 2'-fluoro ribonucleotide
  modified_base 15..21: mod_base = OTHER; note = 2'-O-methyl ribonucleotide
  modified_base 1..3: mod_base = OTHER; note = phosphorothioate linkage
  modified_base 19..21: mod_base = OTHER; note = phosphorothioate linkage
tcgtacagtgccagccttctt

SEQ ID NO: 215 - RNA, 21 nt, synthetic construct
  source 1..21: mol_type = other RNA
  modified_base 1..2: mod_base = OTHER; note = 2'-fluoro ribonucleotide
  modified_base 3..13: mod_base = OTHER; note = 2'-O-methyl ribonucleotide
  modified_base 14: mod_base = OTHER; note = 2'-fluoro ribonucleotide
  modified_base 15..21: mod_base = OTHER; note = 2'-O-methyl ribonucleotide
  modified_base 1..3: mod_base = OTHER; note = phosphorothioate linkage
  modified_base 19..21: mod_base = OTHER; note = phosphorothioate linkage
tcctcactcgtacagtgcctt

SEQ ID NO: 216 - RNA, 21 nt, synthetic construct
  source 1..21: mol_type = other RNA
  modified_base 1..2: mod_base = OTHER; note = 2'-fluoro ribonucleotide
  modified_base 3..13: mod_base = OTHER; note = 2'-O-methyl ribonucleotide
  modified_base 14: mod_base = OTHER; note = 2'-fluoro ribonucleotide
  modified_base 15..21: mod_base = OTHER; note = 2'-O-methyl ribonucleotide
  modified_base 1..3: mod_base = OTHER; note = phosphorothioate linkage
  modified_base 19..21: mod_base = OTHER; note = phosphorothioate linkage
tcacaggcctcactcgtactt

SEQ ID NO: 217 - RNA, 21 nt, synthetic construct
  source 1..21: mol_type = other RNA
  modified_base 1..2: mod_base = OTHER; note = 2'-fluoro ribonucleotide
  modified_base 3..13: mod_base = OTHER; note = 2'-O-methyl ribonucleotide
  modified_base 14: mod_base = OTHER; note = 2'-fluoro ribonucleotide
  modified_base 15..21: mod_base = OTHER; note = 2'-O-methyl ribonucleotide
  modified_base 1..3: mod_base = OTHER; note = phosphorothioate linkage
  modified_base 19..21: mod_base = OTHER; note = phosphorothioate linkage
tcatgagcggtgcaggacatt

SEQ ID NO: 218 - RNA, 21 nt, synthetic construct
  source 1..21: mol_type = other RNA
  modified_base 1..2: mod_base = OTHER; note = 2'-fluoro ribonucleotide
  modified_base 3..13: mod_base = OTHER; note = 2'-O-methyl ribonucleotide
  modified_base 14: mod_base = OTHER; note = 2'-fluoro ribonucleotide
  modified_base 15..21: mod_base = OTHER; note = 2'-O-methyl ribonucleotide
  modified_base 1..3: mod_base = OTHER; note = phosphorothioate linkage
  modified_base 19..21: mod_base = OTHER; note = phosphorothioate linkage
tgcgagcatgagcggtgcatt

SEQ ID NO: 219 - RNA, 21 nt, synthetic construct
  source 1..21: mol_type = other RNA
  modified_base 1..2: mod_base = OTHER; note = 2'-fluoro ribonucleotide
  modified_base 3..13: mod_base = OTHER; note = 2'-O-methyl ribonucleotide
  modified_base 14: mod_base = OTHER; note = 2'-fluoro ribonucleotide
  modified_base 15..21: mod_base = OTHER; note = 2'-O-methyl ribonucleotide
  modified_base 1..3: mod_base = OTHER; note = phosphorothioate linkage
  modified_base 19..21: mod_base = OTHER; note = phosphorothioate linkage
tggcgagcatgagcggtgctt

SEQ ID NO: 220 - RNA, 21 nt, synthetic construct
  source 1..21: mol_type = other RNA
  modified_base 1..2: mod_base = OTHER; note = 2'-fluoro ribonucleotide
  modified_base 3..13: mod_base = OTHER; note = 2'-O-methyl ribonucleotide
  modified_base 14: mod_base = OTHER; note = 2'-fluoro ribonucleotide
  modified_base 15..21: mod_base = OTHER; note = 2'-O-methyl ribonucleotide
  modified_base 1..3: mod_base = OTHER; note = phosphorothioate linkage
  modified_base 19..21: mod_base = OTHER; note = phosphorothioate linkage
tccgggcgagcatgagcggtt

SEQ ID NO: 221 - RNA, 21 nt, synthetic construct
  source 1..21: mol_type = other RNA
  modified_base 1..2: mod_base = OTHER; note = 2'-fluoro ribonucleotide
  modified_base 3..13: mod_base = OTHER; note = 2'-O-methyl ribonucleotide
  modified_base 14: mod_base = OTHER; note = 2'-fluoro ribonucleotide
  modified_base 15..21: mod_base = OTHER; note = 2'-O-methyl ribonucleotide
  modified_base 1..3: mod_base = OTHER; note = phosphorothioate linkage
  modified_base 19..21: mod_base = OTHER; note = phosphorothioate linkage
tcttgaccccaaagccgggtt

SEQ ID NO: 222 - RNA, 21 nt, synthetic construct
  source 1..21: mol_type = other RNA
  modified_base 1..2: mod_base = OTHER; note = 2'-fluoro ribonucleotide
  modified_base 3..13: mod_base = OTHER; note = 2'-O-methyl ribonucleotide
  modified_base 14: mod_base = OTHER; note = 2'-fluoro ribonucleotide
  modified_base 15..21: mod_base = OTHER; note = 2'-O-methyl ribonucleotide
  modified_base 1..3: mod_base = OTHER; note = phosphorothioate linkage
  modified_base 19..21: mod_base = OTHER; note = phosphorothioate linkage
tgctcgcagatggtatcagtt

SEQ ID NO: 223 - RNA, 21 nt, synthetic construct
  source 1..21: mol_type = other RNA
  modified_base 1..2: mod_base = OTHER; note = 2'-fluoro ribonucleotide
  modified_base 3..13: mod_base = OTHER; note = 2'-O-methyl ribonucleotide
  modified_base 14: mod_base = OTHER; note = 2'-fluoro ribonucleotide
  modified_base 15..21: mod_base = OTHER; note = 2'-O-methyl ribonucleotide
  modified_base 1..3: mod_base = OTHER; note = phosphorothioate linkage
  modified_base 19..21: mod_base = OTHER; note = phosphorothioate linkage
tggctcgcagatggtatcatt

SEQ ID NO: 224 - RNA, 21 nt, synthetic construct
  source 1..21: mol_type = other RNA
  modified_base 1..2: mod_base = OTHER; note = 2'-fluoro ribonucleotide
  modified_base 3..13: mod_base = OTHER; note = 2'-O-methyl ribonucleotide
  modified_base 14: mod_base = OTHER; note = 2'-fluoro ribonucleotide
  modified_base 15..21: mod_base = OTHER; note = 2'-O-methyl ribonucleotide
  modified_base 1..3: mod_base = OTHER; note = phosphorothioate linkage
  modified_base 19..21: mod_base = OTHER; note = phosphorothioate linkage
taagaagccgactgggcagtt

SEQ ID NO: 225 - RNA, 21 nt, synthetic construct
  source 1..21: mol_type = other RNA
  modified_base 1..2: mod_base = OTHER; note = 2'-fluoro ribonucleotide
  modified_base 3..13: mod_base = OTHER; note = 2'-O-methyl ribonucleotide
  modified_base 14: mod_base = OTHER; note = 2'-fluoro ribonucleotide
  modified_base 15..21: mod_base = OTHER; note = 2'-O-methyl ribonucleotide
  modified_base 1..3: mod_base = OTHER; note = phosphorothioate linkage
  modified_base 19..21: mod_base = OTHER; note = phosphorothioate linkage
tttcgaaagcagatgacactt

SEQ ID NO: 226 - RNA, 21 nt, synthetic construct
  source 1..21: mol_type = other RNA
  modified_base 1..2: mod_base = OTHER; note = 2'-fluoro ribonucleotide
  modified_base 3..13: mod_base = OTHER; note = 2'-O-methyl ribonucleotide
  modified_base 14: mod_base = OTHER; note = 2'-fluoro ribonucleotide
  modified_base 15..21: mod_base = OTHER; note = 2'-O-methyl ribonucleotide
  modified_base 1..3: mod_base = OTHER; note = phosphorothioate linkage
  modified_base 19..21: mod_base = OTHER; note = phosphorothioate linkage
ttttcgaaagcagatgacatt

SEQ ID NO: 227 - RNA, 21 nt, synthetic construct
  source 1..21: mol_type = other RNA
  modified_base 1..2: mod_base = OTHER; note = 2'-fluoro ribonucleotide
  modified_base 3..13: mod_base = OTHER; note = 2'-O-methyl ribonucleotide
  modified_base 14: mod_base = OTHER; note = 2'-fluoro ribonucleotide
  modified_base 15..21: mod_base = OTHER; note = 2'-O-methyl ribonucleotide
  modified_base 1..3: mod_base = OTHER; note = phosphorothioate linkage
  modified_base 19..21: mod_base = OTHER; note = phosphorothioate linkage
ttttttcgaaagcagatgatt

SEQ ID NO: 228 - RNA, 21 nt, synthetic construct
  source 1..21: mol_type = other RNA
  modified_base 1..2: mod_base = OTHER; note = 2'-fluoro ribonucleotide
  modified_base 3..13: mod_base = OTHER; note = 2'-O-methyl ribonucleotide
  modified_base 14: mod_base = OTHER; note = 2'-fluoro ribonucleotide
  modified_base 15..21: mod_base = OTHER; note = 2'-O-methyl ribonucleotide
  modified_base 1..3: mod_base = OTHER; note = phosphorothioate linkage
  modified_base 19..21: mod_base = OTHER; note = phosphorothioate linkage
tagggtgacatttttcgaatt

SEQ ID NO: 229 - RNA, 21 nt, synthetic construct
  source 1..21: mol_type = other RNA
  modified_base 1..2: mod_base = OTHER; note = 2'-fluoro ribonucleotide
  modified_base 3..13: mod_base = OTHER; note = 2'-O-methyl ribonucleotide
  modified_base 14: mod_base = OTHER; note = 2'-fluoro ribonucleotide
  modified_base 15..21: mod_base = OTHER; note = 2'-O-methyl ribonucleotide
  modified_base 1..3: mod_base = OTHER; note = phosphorothioate linkage
  modified_base 19..21: mod_base = OTHER; note = phosphorothioate linkage
taagggtgacatttttcgatt

SEQ ID NO: 230 - RNA, 21 nt, synthetic construct
  source 1..21: mol_type = other RNA
  modified_base 1..2: mod_base = OTHER; note = 2'-fluoro ribonucleotide
  modified_base 3..13: mod_base = OTHER; note = 2'-O-methyl ribonucleotide
  modified_base 14: mod_base = OTHER; note = 2'-fluoro ribonucleotide
  modified_base 15..21: mod_base = OTHER; note = 2'-O-methyl ribonucleotide
  modified_base 1..3: mod_base = OTHER; note = phosphorothioate linkage
  modified_base 19..21: mod_base = OTHER; note = phosphorothioate linkage
tgtccaagggtgacatttttt

SEQ ID NO: 231 - RNA, 21 nt, synthetic construct
  source 1..21: mol_type = other RNA
  modified_base 1..2: mod_base = OTHER; note = 2'-fluoro ribonucleotide
  modified_base 3..13: mod_base = OTHER; note = 2'-O-methyl ribonucleotide
  modified_base 14: mod_base = OTHER; note = 2'-fluoro ribonucleotide
  modified_base 15..21: mod_base = OTHER; note = 2'-O-methyl ribonucleotide
  modified_base 1..3: mod_base = OTHER; note = phosphorothioate linkage
  modified_base 19..21: mod_base = OTHER; note = phosphorothioate linkage
tcgaagatgatggggatcatt

SEQ ID NO: 232 - RNA, 21 nt, synthetic construct
  source 1..21: mol_type = other RNA
  modified_base 1..2: mod_base = OTHER; note = 2'-fluoro ribonucleotide
  modified_base 3..13: mod_base = OTHER; note = 2'-O-methyl ribonucleotide
  modified_base 14: mod_base = OTHER; note = 2'-fluoro ribonucleotide
  modified_base 15..21: mod_base = OTHER; note = 2'-O-methyl ribonucleotide
  modified_base 1..3: mod_base = OTHER; note = phosphorothioate linkage
  modified_base 19..21: mod_base = OTHER; note = phosphorothioate linkage
tatcccgaagatgatggggtt

SEQ ID NO: 233 - RNA, 21 nt, synthetic construct
  source 1..21: mol_type = other RNA
  modified_base 1..2: mod_base = OTHER; note = 2'-fluoro ribonucleotide
  modified_base 3..13: mod_base = OTHER; note = 2'-O-methyl ribonucleotide
  modified_base 14: mod_base = OTHER; note = 2'-fluoro ribonucleotide
  modified_base 15..21: mod_base = OTHER; note = 2'-O-methyl ribonucleotide
  modified_base 1..3: mod_base = OTHER; note = phosphorothioate linkage
  modified_base 19..21: mod_base = OTHER; note = phosphorothioate linkage
taaacaggatcccgaagattt

SEQ ID NO: 234 - RNA, 21 nt, synthetic construct
  source 1..21: mol_type = other RNA
  modified_base 1..2: mod_base = OTHER; note = 2'-fluoro ribonucleotide
  modified_base 3..13: mod_base = OTHER; note = 2'-O-methyl ribonucleotide
  modified_base 14: mod_base = OTHER; note = 2'-fluoro ribonucleotide
  modified_base 15..21: mod_base = OTHER; note = 2'-O-methyl ribonucleotide
  modified_base 1..3: mod_base = OTHER; note = phosphorothioate linkage
  modified_base 19..21: mod_base = OTHER; note = phosphorothioate linkage
tcttattggttggcttctttt

SEQ ID NO: 235 - RNA, 21 nt, synthetic construct
  source 1..21: mol_type = other RNA
  modified_base 1..2: mod_base = OTHER; note = 2'-fluoro ribonucleotide
  modified_base 3..13: mod_base = OTHER; note = 2'-O-methyl ribonucleotide
  modified_base 14: mod_base = OTHER; note = 2'-fluoro ribonucleotide
  modified_base 15..21: mod_base = OTHER; note = 2'-O-methyl ribonucleotide
  modified_base 1..3: mod_base = OTHER; note = phosphorothioate linkage
  modified_base 19..21: mod_base = OTHER; note = phosphorothioate linkage
tggccttattggttggctttt

SEQ ID NO: 236 - RNA, 21 nt, synthetic construct
  source 1..21: mol_type = other RNA
  modified_base 1..2: mod_base = OTHER; note = 2'-fluoro ribonucleotide
  modified_base 3..13: mod_base = OTHER; note = 2'-O-methyl ribonucleotide
  modified_base 14: mod_base = OTHER; note = 2'-fluoro ribonucleotide
  modified_base 15..21: mod_base = OTHER; note = 2'-O-methyl ribonucleotide
  modified_base 1..3: mod_base = OTHER; note = phosphorothioate linkage
  modified_base 19..21: mod_base = OTHER; note = phosphorothioate linkage
tcgtcgggaaaattgatcttt

SEQ ID NO: 237 - RNA, 21 nt, synthetic construct
  source 1..21: mol_type = other RNA
  modified_base 1..2: mod_base = OTHER; note = 2'-fluoro ribonucleotide
  modified_base 3..13: mod_base = OTHER; note = 2'-O-methyl ribonucleotide
  modified_base 14: mod_base = OTHER; note = 2'-fluoro ribonucleotide
  modified_base 15..21: mod_base = OTHER; note = 2'-O-methyl ribonucleotide
  modified_base 1..3: mod_base = OTHER; note = phosphorothioate linkage
  modified_base 19..21: mod_base = OTHER; note = phosphorothioate linkage
ttcgtcgggaaaattgatctt

SEQ ID NO: 238 - RNA, 21 nt, synthetic construct
  source 1..21: mol_type = other RNA
  modified_base 1..2: mod_base = OTHER; note = 2'-fluoro ribonucleotide
  modified_base 3..13: mod_base = OTHER; note = 2'-O-methyl ribonucleotide
  modified_base 14: mod_base = OTHER; note = 2'-fluoro ribonucleotide
  modified_base 15..21: mod_base = OTHER; note = 2'-O-methyl ribonucleotide
  modified_base 1..3: mod_base = OTHER; note = phosphorothioate linkage
  modified_base 19..21: mod_base = OTHER; note = phosphorothioate linkage
tatcgtcgggaaaattgattt

SEQ ID NO: 239 - RNA, 21 nt, synthetic construct
  source 1..21: mol_type = other RNA
  modified_base 1..2: mod_base = OTHER; note = 2'-fluoro ribonucleotide
  modified_base 3..13: mod_base = OTHER; note = 2'-O-methyl ribonucleotide
  modified_base 14: mod_base = OTHER; note = 2'-fluoro ribonucleotide
  modified_base 15..21: mod_base = OTHER; note = 2'-O-methyl ribonucleotide
  modified_base 1..3: mod_base = OTHER; note = phosphorothioate linkage
  modified_base 19..21: mod_base = OTHER; note = phosphorothioate linkage
tgatcgtcgggaaaattgatt

SEQ ID NO: 240 - RNA, 21 nt, synthetic construct
  source 1..21: mol_type = other RNA
  modified_base 1..2: mod_base = OTHER; note = 2'-fluoro ribonucleotide
  modified_base 3..13: mod_base = OTHER; note = 2'-O-methyl ribonucleotide
  modified_base 14: mod_base = OTHER; note = 2'-fluoro ribonucleotide
  modified_base 15..21: mod_base = OTHER; note = 2'-O-methyl ribonucleotide
  modified_base 1..3: mod_base = OTHER; note = phosphorothioate linkage
  modified_base 19..21: mod_base = OTHER; note = phosphorothioate linkage
tgagccaggaagatcgtcgtt

SEQ ID NO: 241 - RNA, 21 nt, synthetic construct
  source 1..21: mol_type = other RNA
  modified_base 1..2: mod_base = OTHER; note = 2'-fluoro ribonucleotide
  modified_base 3..13: mod_base = OTHER; note = 2'-O-methyl ribonucleotide
  modified_base 14: mod_base = OTHER; note = 2'-fluoro ribonucleotide
  modified_base 15..21: mod_base = OTHER; note = 2'-O-methyl ribonucleotide
  modified_base 1..3: mod_base = OTHER; note = phosphorothioate linkage
  modified_base 19..21: mod_base = OTHER; note = phosphorothioate linkage
ttggagccaggaagatcgttt

SEQ ID NO: 242 - RNA, 21 nt, synthetic construct
  source 1..21: mol_type = other RNA
  modified_base 1..2: mod_base = OTHER; note = 2'-fluoro ribonucleotide
  modified_base 3..13: mod_base = OTHER; note = 2'-O-methyl ribonucleotide
  modified_base 14: mod_base = OTHER; note = 2'-fluoro ribonucleotide
  modified_base 15..21: mod_base = OTHER; note = 2'-O-methyl ribonucleotide
  modified_base 1..3: mod_base = OTHER; note = phosphorothioate linkage
  modified_base 19..21: mod_base = OTHER; note = phosphorothioate linkage
tgttggagccaggaagatctt

SEQ ID NO: 243 - RNA, 21 nt, synthetic construct
  source 1..21: mol_type = other RNA
  modified_base 1..2: mod_base = OTHER; note = 2'-fluoro ribonucleotide
  modified_base 3..13: mod_base = OTHER; note = 2'-O-methyl ribonucleotide
  modified_base 14: mod_base = OTHER; note = 2'-fluoro ribonucleotide
  modified_base 15..21: mod_base = OTHER; note = 2'-O-methyl ribonucleotide
  modified_base 1..3: mod_base = OTHER; note = phosphorothioate linkage
  modified_base 19..21: mod_base = OTHER; note = phosphorothioate linkage
tcatgtaaagtctcctgcatt

SEQ ID NO: 244 - RNA, 21 nt, synthetic construct
  source 1..21: mol_type = other RNA
  modified_base 1..2: mod_base = OTHER; note = 2'-fluoro ribonucleotide
  modified_base 3..13: mod_base = OTHER; note = 2'-O-methyl ribonucleotide
  modified_base 14: mod_base = OTHER; note = 2'-fluoro ribonucleotide
  modified_base 15..21: mod_base = OTHER; note = 2'-O-methyl ribonucleotide
  modified_base 1..3: mod_base = OTHER; note = phosphorothioate linkage
  modified_base 19..21: mod_base = OTHER; note = phosphorothioate linkage
ttccatgtaaagtctcctgtt

SEQ ID NO: 245 - RNA, 21 nt, synthetic construct
  source 1..21: mol_type = other RNA
  modified_base 1..2: mod_base = OTHER; note = 2'-fluoro ribonucleotide
  modified_base 3..13: mod_base = OTHER; note = 2'-O-methyl ribonucleotide
  modified_base 14: mod_base = OTHER; note = 2'-fluoro ribonucleotide
  modified_base 15..21: mod_base = OTHER; note = 2'-O-methyl ribonucleotide
  modified_base 1..3: mod_base = OTHER; note = phosphorothioate linkage
  modified_base 19..21: mod_base = OTHER; note = phosphorothioate linkage
tcatccatgtaaagtctcctt

SEQ ID NO: 246 - RNA, 21 nt, synthetic construct
  source 1..21: mol_type = other RNA
  modified_base 1..2: mod_base = OTHER; note = 2'-fluoro ribonucleotide
  modified_base 3..13: mod_base = OTHER; note = 2'-O-methyl ribonucleotide
  modified_base 14: mod_base = OTHER; note = 2'-fluoro ribonucleotide
  modified_base 15..21: mod_base = OTHER; note = 2'-O-methyl ribonucleotide
  modified_base 1..3: mod_base = OTHER; note = phosphorothioate linkage
  modified_base 19..21: mod_base = OTHER; note = phosphorothioate linkage
tgactctctttgccatccttt

SEQ ID NO: 247 - RNA, 21 nt, synthetic construct
  source 1..21: mol_type = other RNA
  modified_base 1..2: mod_base = OTHER; note = 2'-fluoro ribonucleotide
  modified_base 3..13: mod_base = OTHER; note = 2'-O-methyl ribonucleotide
  modified_base 14: mod_base = OTHER; note = 2'-fluoro ribonucleotide
  modified_base 15..21: mod_base = OTHER; note = 2'-O-methyl ribonucleotide
  modified_base 1..3: mod_base = OTHER; note = phosphorothioate linkage
  modified_base 19..21: mod_base = OTHER; note = phosphorothioate linkage
tcgactctctttgccatcctt

SEQ ID NO: 248 - RNA, 21 nt, synthetic construct
  source 1..21: mol_type = other RNA
  modified_base 1..2: mod_base = OTHER; note = 2'-fluoro ribonucleotide
  modified_base 3..13: mod_base = OTHER; note = 2'-O-methyl ribonucleotide
  modified_base 14: mod_base = OTHER; note = 2'-fluoro ribonucleotide
  modified_base 15..21: mod_base = OTHER; note = 2'-O-methyl ribonucleotide
  modified_base 1..3: mod_base = OTHER; note = phosphorothioate linkage
  modified_base 19..21: mod_base = OTHER; note = phosphorothioate linkage
tatgcgactctctttgccatt

SEQ ID NO: 249 - RNA, 21 nt, synthetic construct
  source 1..21: mol_type = other RNA
  modified_base 1..2: mod_base = OTHER; note = 2'-fluoro ribonucleotide
  modified_base 3..13: mod_base = OTHER; note = 2'-O-methyl ribonucleotide
  modified_base 14: mod_base = OTHER; note = 2'-fluoro ribonucleotide
  modified_base 15..21: mod_base = OTHER; note = 2'-O-methyl ribonucleotide
  modified_base 1..3: mod_base = OTHER; note = phosphorothioate linkage
  modified_base 19..21: mod_base = OTHER; note = phosphorothioate linkage
tgatgcgactctctttgcctt

SEQ ID NO: 250 - RNA, 21 nt, synthetic construct
  source 1..21: mol_type = other RNA
  modified_base 1..2: mod_base = OTHER; note = 2'-fluoro ribonucleotide
  modified_base 3..13: mod_base = OTHER; note = 2'-O-methyl ribonucleotide
  modified_base 14: mod_base = OTHER; note = 2'-fluoro ribonucleotide
  modified_base 15..21: mod_base = OTHER; note = 2'-O-methyl ribonucleotide
  modified_base 1..3: mod_base = OTHER; note = phosphorothioate linkage
  modified_base 19..21: mod_base = OTHER; note = phosphorothioate linkage
tagatgcgactctctttgctt

SEQ ID NO: 251 - RNA, 21 nt, synthetic construct
  source 1..21: mol_type = other RNA
  modified_base 1..2: mod_base = OTHER; note = 2'-fluoro ribonucleotide
  modified_base 3..13: mod_base = OTHER; note = 2'-O-methyl ribonucleotide
  modified_base 14: mod_base = OTHER; note = 2'-fluoro ribonucleotide
  modified_base 15..21: mod_base = OTHER; note = 2'-O-methyl ribonucleotide
  modified_base 1..3: mod_base = OTHER; note = phosphorothioate linkage
  modified_base 19..21: mod_base = OTHER; note = phosphorothioate linkage
ttgagatgcgactctcttttt

SEQ ID NO: 252 - RNA, 21 nt, synthetic construct
  source 1..21: mol_type = other RNA
  modified_base 1..2: mod_base = OTHER; note = 2'-fluoro ribonucleotide
  modified_base 3..13: mod_base = OTHER; note = 2'-O-methyl ribonucleotide
  modified_base 14: mod_base = OTHER; note = 2'-fluoro ribonucleotide
  modified_base 15..21: mod_base = OTHER; note = 2'-O-methyl ribonucleotide
  modified_base 1..3: mod_base = OTHER; note = phosphorothioate linkage
  modified_base 19..21: mod_base = OTHER; note = phosphorothioate linkage
tctgagatgcgactctctttt

SEQ ID NO: 253 - RNA, 21 nt, synthetic construct
  source 1..21: mol_type = other RNA
  modified_base 1..2: mod_base = OTHER; note = 2'-fluoro ribonucleotide
  modified_base 3..13: mod_base = OTHER; note = 2'-O-methyl ribonucleotide
  modified_base 14: mod_base = OTHER; note = 2'-fluoro ribonucleotide
  modified_base 15..21: mod_base = OTHER; note = 2'-O-methyl ribonucleotide
  modified_base 1..3: mod_base = OTHER; note = phosphorothioate linkage
  modified_base 19..21: mod_base = OTHER; note = phosphorothioate linkage
tactgagatgcgactctcttt

SEQ ID NO: 254 - RNA, 21 nt, synthetic construct
  source 1..21: mol_type = other RNA
  modified_base 1..2: mod_base = OTHER; note = 2'-fluoro ribonucleotide
  modified_base 3..13: mod_base = OTHER; note = 2'-O-methyl ribonucleotide
  modified_base 14: mod_base = OTHER; note = 2'-fluoro ribonucleotide
  modified_base 15..21: mod_base = OTHER; note = 2'-O-methyl ribonucleotide
  modified_base 1..3: mod_base = OTHER; note = phosphorothioate linkage
  modified_base 19..21: mod_base = OTHER; note = phosphorothioate linkage
tcactgagatgcgactctctt

SEQ ID NO: 255 - RNA, 21 nt, synthetic construct
  source 1..21: mol_type = other RNA
  modified_base 1..2: mod_base = OTHER; note = 2'-fluoro ribonucleotide
  modified_base 3..13: mod_base = OTHER; note = 2'-O-methyl ribonucleotide
  modified_base 14: mod_base = OTHER; note = 2'-fluoro ribonucleotide
  modified_base 15..21: mod_base = OTHER; note = 2'-O-methyl ribonucleotide
  modified_base 1..3: mod_base = OTHER; note = phosphorothioate linkage
  modified_base 19..21: mod_base = OTHER; note = phosphorothioate linkage
tgcactgagatgcgactcttt

SEQ ID NO: 256 - RNA, 21 nt, synthetic construct
  source 1..21: mol_type = other RNA
  modified_base 1..2: mod_base = OTHER; note = 2'-fluoro ribonucleotide
  modified_base 3..13: mod_base = OTHER; note = 2'-O-methyl ribonucleotide
  modified_base 14: mod_base = OTHER; note = 2'-fluoro ribonucleotide
  modified_base 15..21: mod_base = OTHER; note = 2'-O-methyl ribonucleotide
  modified_base 1..3: mod_base = OTHER; note = phosphorothioate linkage
  modified_base 19..21: mod_base = OTHER; note = phosphorothioate linkage
ttgcactgagatgcgactctt

SEQ ID NO: 257 - RNA, 21 nt, synthetic construct
  source 1..21: mol_type = other RNA
  modified_base 1..2: mod_base = OTHER; note = 2'-fluoro ribonucleotide
  modified_base 3..13: mod_base = OTHER; note = 2'-O-methyl ribonucleotide
  modified_base 14: mod_base = OTHER; note = 2'-fluoro ribonucleotide
  modified_base 15..21: mod_base = OTHER; note = 2'-O-methyl ribonucleotide
  modified_base 1..3: mod_base = OTHER; note = phosphorothioate linkage
  modified_base 19..21: mod_base = OTHER; note = phosphorothioate linkage
tcctgcactgagatgcgactt

SEQ ID NO: 258 - RNA, 21 nt, synthetic construct
  source 1..21: mol_type = other RNA
  modified_base 1..2: mod_base = OTHER; note = 2'-fluoro ribonucleotide
  modified_base 3..13: mod_base = OTHER; note = 2'-O-methyl ribonucleotide
  modified_base 14: mod_base = OTHER; note = 2'-fluoro ribonucleotide
  modified_base 15..21: mod_base = OTHER; note = 2'-O-methyl ribonucleotide
  modified_base 1..3: mod_base = OTHER; note = phosphorothioate linkage
  modified_base 19..21: mod_base = OTHER; note = phosphorothioate linkage
taccctcacgccacagcagtt

SEQ ID NO: 259 - RNA, 21 nt, synthetic construct
  source 1..21: mol_type = other RNA
  modified_base 1..2: mod_base = OTHER; note = 2'-fluoro ribonucleotide
  modified_base 3..13: mod_base = OTHER; note = 2'-O-methyl ribonucleotide
  modified_base 14: mod_base = OTHER; note = 2'-fluoro ribonucleotide
  modified_base 15..21: mod_base = OTHER; note = 2'-O-methyl ribonucleotide
  modified_base 1..3: mod_base = OTHER; note = phosphorothioate linkage
  modified_base 19..21: mod_base = OTHER; note = phosphorothioate linkage
tctatgcccagtcagtgcctt

SEQ ID NO: 260 - RNA, 21 nt, synthetic construct
  source 1..21: mol_type = other RNA
  modified_base 1..2: mod_base = OTHER; note = 2'-fluoro ribonucleotide
  modified_base 3..13: mod_base = OTHER; note = 2'-O-methyl ribonucleotide
  modified_base 14: mod_base = OTHER; note = 2'-fluoro ribonucleotide
  modified_base 15..21: mod_base = OTHER; note = 2'-O-methyl ribonucleotide
  modified_base 1..3: mod_base = OTHER; note = phosphorothioate linkage
  modified_base 19..21: mod_base = OTHER; note = phosphorothioate linkage
taagcggggagctatgccctt

SEQ ID NO: 261 - RNA, 21 nt, synthetic construct
  source 1..21: mol_type = other RNA
  modified_base 1..2: mod_base = OTHER; note = 2'-fluoro ribonucleotide
  modified_base 3..13: mod_base = OTHER; note = 2'-O-methyl ribonucleotide
  modified_base 14: mod_base = OTHER; note = 2'-fluoro ribonucleotide
  modified_base 15..21: mod_base = OTHER; note = 2'-O-methyl ribonucleotide
  modified_base 1..3: mod_base = OTHER; note = phosphorothioate linkage
  modified_base 19..21: mod_base = OTHER; note = phosphorothioate linkage
tggtgaagtgagaggttcttt

SEQ ID NO: 262 - RNA, 21 nt, synthetic construct
  source 1..21: mol_type = other RNA
  modified_base 1..2: mod_base = OTHER; note = 2'-fluoro ribonucleotide
  modified_base 3..13: mod_base = OTHER; note = 2'-O-methyl ribonucleotide
  modified_base 14: mod_base = OTHER; note = 2'-fluoro ribonucleotide
  modified_base 15..21: mod_base = OTHER; note = 2'-O-methyl ribonucleotide
  modified_base 1..3: mod_base = OTHER; note = phosphorothioate linkage
  modified_base 19..21: mod_base = OTHER; note = phosphorothioate linkage
tgggtgaagtgagaggttctt

SEQ ID NO: 263 - RNA, 21 nt, synthetic construct
  source 1..21: mol_type = other RNA
  modified_base 1..2: mod_base = OTHER; note = 2'-fluoro ribonucleotide
  modified_base 3..13: mod_base = OTHER; note = 2'-O-methyl ribonucleotide
  modified_base 14: mod_base = OTHER; note = 2'-fluoro ribonucleotide
  modified_base 15..21: mod_base = OTHER; note = 2'-O-methyl ribonucleotide
  modified_base 1..3: mod_base = OTHER; note = phosphorothioate linkage
  modified_base 19..21: mod_base = OTHER; note = phosphorothioate linkage
taatacaagttgggagacttt

SEQ ID NO: 264 - RNA, 21 nt, synthetic construct
  source 1..21: mol_type = other RNA
  modified_base 1..2: mod_base = OTHER; note = 2'-fluoro ribonucleotide
  modified_base 3..13: mod_base = OTHER; note = 2'-O-methyl ribonucleotide
  modified_base 14: mod_base = OTHER; note = 2'-fluoro ribonucleotide
  modified_base 15..21: mod_base = OTHER; note = 2'-O-methyl ribonucleotide
  modified_base 1..3: mod_base = OTHER; note = phosphorothioate linkage
  modified_base 19..21: mod_base = OTHER; note = phosphorothioate linkage
tggtggatattactaaacctt

SEQ ID NO: 265 - RNA, 21 nt, synthetic construct
  source 1..21: mol_type = other RNA
  modified_base 1..2: mod_base = OTHER; note = 2'-fluoro ribonucleotide
  modified_base 3..13: mod_base = OTHER; note = 2'-O-methyl ribonucleotide
  modified_base 14: mod_base = OTHER; note = 2'-fluoro ribonucleotide
  modified_base 15..21: mod_base = OTHER; note = 2'-O-methyl ribonucleotide
  modified_base 1..3: mod_base = OTHER; note = phosphorothioate linkage
  modified_base 19..21: mod_base = OTHER; note = phosphorothioate linkage
ttggtggatattactaaactt

SEQ ID NO: 266 - RNA, 21 nt, synthetic construct
  source 1..21: mol_type = other RNA
  modified_base 1..2: mod_base = OTHER; note = 2'-fluoro ribonucleotide
  modified_base 3..13: mod_base = OTHER; note = 2'-O-methyl ribonucleotide
  modified_base 14: mod_base = OTHER; note = 2'-fluoro ribonucleotide
  modified_base 15..21: mod_base = OTHER; note = 2'-O-methyl ribonucleotide
  modified_base 1..3: mod_base = OTHER; note = phosphorothioate linkage
  modified_base 19..21: mod_base = OTHER; note = phosphorothioate linkage
tctggtggatattactaaatt

SEQ ID NO: 267 - RNA, 21 nt, synthetic construct
  source 1..21: mol_type = other RNA
  modified_base 1..2: mod_base = OTHER; note = 2'-fluoro ribonucleotide
  modified_base 3..13: mod_base = OTHER; note = 2'-O-methyl ribonucleotide
  modified_base 14: mod_base = OTHER; note = 2'-fluoro ribonucleotide
  modified_base 15..21: mod_base = OTHER; note = 2'-O-methyl ribonucleotide
  modified_base 1..3: mod_base = OTHER; note = phosphorothioate linkage
  modified_base 19..21: mod_base = OTHER; note = phosphorothioate linkage
taggtctggtggatattactt

SEQ ID NO: 268 - RNA, 21 nt, synthetic construct
  source 1..21: mol_type = other RNA
  modified_base 1..2: mod_base = OTHER; note = 2'-fluoro ribonucleotide
  modified_base 3..13: mod_base = OTHER; note = 2'-O-methyl ribonucleotide
  modified_base 14: mod_base = OTHER; note = 2'-fluoro ribonucleotide
  modified_base 15..21: mod_base = OTHER; note = 2'-O-methyl ribonucleotide
  modified_base 1..3: mod_base = OTHER; note = phosphorothioate linkage
  modified_base 19..21: mod_base = OTHER; note = phosphorothioate linkage
taaggtctggtggatattatt

SEQ ID NO: 269 - RNA, 21 nt, synthetic construct
  source 1..21: mol_type = other RNA
  modified_base 1..2: mod_base = OTHER; note = 2'-fluoro ribonucleotide
  modified_base 3..13: mod_base = OTHER; note = 2'-O-methyl ribonucleotide
  modified_base 14: mod_base = OTHER; note = 2'-fluoro ribonucleotide
  modified_base 15..21: mod_base = OTHER; note = 2'-O-methyl ribonucleotide
  modified_base 1..3: mod_base = OTHER; note = phosphorothioate linkage
  modified_base 19..21: mod_base = OTHER; note = phosphorothioate linkage
tcgcagggaagccaccatgtt

SEQ ID NO: 270 - RNA, 21 nt, synthetic construct
  source 1..21: mol_type = other RNA
  modified_base 1..2: mod_base = OTHER; note = 2'-fluoro ribonucleotide
  modified_base 3..13: mod_base = OTHER; note = 2'-O-methyl ribonucleotide
  modified_base 14: mod_base = OTHER; note = 2'-fluoro ribonucleotide
  modified_base 15..21: mod_base = OTHER; note = 2'-O-methyl ribonucleotide
  modified_base 1..3: mod_base = OTHER; note = phosphorothioate linkage
  modified_base 19..21: mod_base = OTHER; note = phosphorothioate linkage
ttatggcttcctgggcgcatt

SEQ ID NO: 271 - RNA, 21 nt, synthetic construct
  source 1..21: mol_type = other RNA
  modified_base 1..2: mod_base = OTHER; note = 2'-fluoro ribonucleotide
  modified_base 3..13: mod_base = OTHER; note = 2'-O-methyl ribonucleotide
  modified_base 14: mod_base = OTHER; note = 2'-fluoro ribonucleotide
  modified_base 15..21: mod_base = OTHER; note = 2'-O-methyl ribonucleotide
  modified_base 1..3: mod_base = OTHER; note = phosphorothioate linkage
  modified_base 19..21: mod_base = OTHER; note = phosphorothioate linkage
ttatatggcttcctgggcgtt

SEQ ID NO: 272 - RNA, 21 nt, synthetic construct
  source 1..21: mol_type = other RNA
  modified_base 1..2: mod_base = OTHER; note = 2'-fluoro ribonucleotide
  modified_base 3..13: mod_base = OTHER; note = 2'-O-methyl ribonucleotide
  modified_base 14: mod_base = OTHER; note = 2'-fluoro ribonucleotide
  modified_base 15..21: mod_base = OTHER; note = 2'-O-methyl ribonucleotide
  modified_base 1..3: mod_base = OTHER; note = phosphorothioate linkage
  modified_base 19..21: mod_base = OTHER; note = phosphorothioate linkage
tgcatctgtgtatatggcttt

SEQ ID NO: 273 - RNA, 21 nt, synthetic construct
  source 1..21: mol_type = other RNA
  modified_base 1..2: mod_base = OTHER; note = 2'-fluoro ribonucleotide
  modified_base 3..13: mod_base = OTHER; note = 2'-O-methyl ribonucleotide
  modified_base 14: mod_base = OTHER; note = 2'-fluoro ribonucleotide
  modified_base 15..21: mod_base = OTHER; note = 2'-O-methyl ribonucleotide
  modified_base 1..3: mod_base = OTHER; note = phosphorothioate linkage
  modified_base 19..21: mod_base = OTHER; note = phosphorothioate linkage
tggcatctgtgtatatggctt

SEQ ID NO: 274 - RNA, 21 nt, synthetic construct
  source 1..21: mol_type = other RNA
  modified_base 1..2: mod_base = OTHER; note = 2'-fluoro ribonucleotide
  modified_base 3..13: mod_base = OTHER; note = 2'-O-methyl ribonucleotide
  modified_base 14: mod_base = OTHER; note = 2'-fluoro ribonucleotide
  modified_base 15..21: mod_base = OTHER; note = 2'-O-methyl ribonucleotide
  modified_base 1..3: mod_base = OTHER; note = phosphorothioate linkage
  modified_base 19..21: mod_base = OTHER; note = phosphorothioate linkage
tgttcactatcacaaacaatt

SEQ ID NO: 275 - RNA, 21 nt, synthetic construct
  source 1..21: mol_type = other RNA
  modified_base 1..2: mod_base = OTHER; note = 2'-fluoro ribonucleotide
  modified_base 3..13: mod_base = OTHER; note = 2'-O-methyl ribonucleotide
  modified_base 14: mod_base = OTHER; note = 2'-fluoro ribonucleotide
  modified_base 15..21: mod_base = OTHER; note = 2'-O-methyl ribonucleotide
  modified_base 1..3: mod_base = OTHER; note = phosphorothioate linkage
  modified_base 19..21: mod_base = OTHER; note = phosphorothioate linkage
tgacagttaagcagcttcctt

SEQ ID NO: 276 - RNA, 21 nt, synthetic construct
  source 1..21: mol_type = other RNA
  modified_base 1..2: mod_base = OTHER; note = 2'-fluoro ribonucleotide
  modified_base 3..13: mod_base = OTHER; note = 2'-O-methyl ribonucleotide
  modified_base 14: mod_base = OTHER; note = 2'-fluoro ribonucleotide
  modified_base 15..21: mod_base = OTHER; note = 2'-O-methyl ribonucleotide
  modified_base 1..3: mod_base = OTHER; note = phosphorothioate linkage
  modified_base 19..21: mod_base = OTHER; note = phosphorothioate linkage
tgatggacagttaagcagctt

SEQ ID NO: 277 - RNA, 21 nt, synthetic construct
  source 1..21: mol_type = other RNA
  modified_base 1..2: mod_base = OTHER; note = 2'-fluoro ribonucleotide
  modified_base 3..13: mod_base = OTHER; note = 2'-O-methyl ribonucleotide
  modified_base 14: mod_base = OTHER; note = 2'-fluoro ribonucleotide
  modified_base 15..21: mod_base = OTHER; note = 2'-O-methyl ribonucleotide
  modified_base 1..3: mod_base = OTHER; note = phosphorothioate linkage
  modified_base 19..21: mod_base = OTHER; note = phosphorothioate linkage
ttttagccagtctcctgcttt

SEQ ID NO: 278 - RNA, 21 nt, synthetic construct
  source 1..21: mol_type = other RNA
  modified_base 1..2: mod_base = OTHER; note = 2'-fluoro ribonucleotide
  modified_base 3..13: mod_base = OTHER; note = 2'-O-methyl ribonucleotide
  modified_base 14: mod_base = OTHER; note = 2'-fluoro ribonucleotide
  modified_base 15..21: mod_base = OTHER; note = 2'-O-methyl ribonucleotide
  modified_base 1..3: mod_base = OTHER; note = phosphorothioate linkage
  modified_base 19..21: mod_base = OTHER; note = phosphorothioate linkage
tatttagccagtctcctgctt

SEQ ID NO: 279 - RNA, 21 nt, synthetic construct
  source 1..21: mol_type = other RNA
  modified_base 1..2: mod_base = OTHER; note = 2'-fluoro ribonucleotide
  modified_base 3..13: mod_base = OTHER; note = 2'-O-methyl ribonucleotide
  modified_base 14: mod_base = OTHER; note = 2'-fluoro ribonucleotide
  modified_base 15..21: mod_base = OTHER; note = 2'-O-methyl ribonucleotide
  modified_base 1..3: mod_base = OTHER; note = phosphorothioate linkage
  modified_base 19..21: mod_base = OTHER; note = phosphorothioate linkage
ttatttagccagtctcctgtt

SEQ ID NO: 280 - RNA, 21 nt, synthetic construct
  source 1..21: mol_type = other RNA
  modified_base 1..2: mod_base = OTHER; note = 2'-fluoro ribonucleotide
  modified_base 3..13: mod_base = OTHER; note = 2'-O-methyl ribonucleotide
  modified_base 14: mod_base = OTHER; note = 2'-fluoro ribonucleotide
  modified_base 15..21: mod_base = OTHER; note = 2'-O-methyl ribonucleotide
  modified_base 1..3: mod_base = OTHER; note = phosphorothioate linkage
  modified_base 19..21: mod_base = OTHER; note = phosphorothioate linkage
ttttgagattctgttgtattt

SEQ ID NO: 281 - RNA, 21 nt, synthetic construct
  source 1..21: mol_type = other RNA
  modified_base 1..2: mod_base = OTHER; note = 2'-fluoro ribonucleotide
  modified_base 3..13: mod_base = OTHER; note = 2'-O-methyl ribonucleotide
  modified_base 14: mod_base = OTHER; note = 2'-fluoro ribonucleotide
  modified_base 15..21: mod_base = OTHER; note = 2'-O-methyl ribonucleotide
  modified_base 1..3: mod_base = OTHER; note = phosphorothioate linkage
  modified_base 19..21: mod_base = OTHER; note = phosphorothioate linkage
tcgagctgtgggttttctgtt

SEQ ID NO: 282 - RNA, 21 nt, synthetic construct
  source 1..21: mol_type = other RNA
  modified_base 1..2: mod_base = OTHER; note = 2'-fluoro ribonucleotide
  modified_base 3..13: mod_base = OTHER; note = 2'-O-methyl ribonucleotide
  modified_base 14: mod_base = OTHER; note = 2'-fluoro ribonucleotide
  modified_base 15..21: mod_base = OTHER; note = 2'-O-methyl ribonucleotide
  modified_base 1..3: mod_base = OTHER; note = phosphorothioate linkage
  modified_base 19..21: mod_base = OTHER; note = phosphorothioate linkage
tactcttcgagctgtgggttt

SEQ ID NO: 283 - RNA, 21 nt, synthetic construct
  source 1..21: mol_type = other RNA
  modified_base 1..2: mod_base = OTHER; note = 2'-fluoro ribonucleotide
  modified_base 3..13: mod_base = OTHER; note = 2'-O-methyl ribonucleotide
  modified_base 14: mod_base = OTHER; note = 2'-fluoro ribonucleotide
  modified_base 15..21: mod_base = OTHER; note = 2'-O-methyl ribonucleotide
  modified_base 1..3: mod_base = OTHER; note = phosphorothioate linkage
  modified_base 19..21: mod_base = OTHER; note = phosphorothioate linkage
tcgtcaccactcttcgagctt

SEQ ID NO: 284 - RNA, 21 nt, synthetic construct
  source 1..21: mol_type = other RNA
  modified_base 1..2: mod_base = OTHER; note = 2'-fluoro ribonucleotide
  modified_base 3..13: mod_base = OTHER; note = 2'-O-methyl ribonucleotide
  modified_base 14: mod_base = OTHER; note = 2'-fluoro ribonucleotide
  modified_base 15..21: mod_base = OTHER; note = 2'-O-methyl ribonucleotide
  modified_base 1..3: mod_base = OTHER; note = phosphorothioate linkage
  modified_base 19..21: mod_base = OTHER; note = phosphorothioate linkage
tgacgtcaccactcttcgatt

SEQ ID NO: 285 - RNA, 21 nt, synthetic construct
  source 1..21: mol_type = other RNA
  modified_base 1..2: mod_base = OTHER; note = 2'-fluoro ribonucleotide
  modified_base 3..13: mod_base = OTHER; note = 2'-O-methyl ribonucleotide
  modified_base 14: mod_base = OTHER; note = 2'-fluoro ribonucleotide
  modified_base 15..21: mod_base = OTHER; note = 2'-O-methyl ribonucleotide
  modified_base 1..3: mod_base = OTHER; note = phosphorothioate linkage
  modified_base 19..21: mod_base = OTHER; note = phosphorothioate linkage
tcagacgtcaccactcttctt

SEQ ID NO: 286 - RNA, 21 nt, synthetic construct
  source 1..21: mol_type = other RNA
  modified_base 1..2: mod_base = OTHER; note = 2'-fluoro ribonucleotide
  modified_base 3..13: mod_base = OTHER; note = 2'-O-methyl ribonucleotide
  modified_base 14: mod_base = OTHER; note = 2'-fluoro ribonucleotide
  modified_base 15..21: mod_base = OTHER; note = 2'-O-methyl ribonucleotide
  modified_base 1..3: mod_base = OTHER; note = phosphorothioate linkage
  modified_base 19..21: mod_base = OTHER; note = phosphorothioate linkage
tatctccctttaaccaacctt

SEQ ID NO: 287 - RNA, 21 nt, synthetic construct
  source 1..21: mol_type = other RNA
  modified_base 1..2: mod_base = OTHER; note = 2'-fluoro ribonucleotide
  modified_base 3..13: mod_base = OTHER; note = 2'-O-methyl ribonucleotide
  modified_base 14: mod_base = OTHER; note = 2'-fluoro ribonucleotide
  modified_base 15..21: mod_base = OTHER; note = 2'-O-methyl ribonucleotide
  modified_base 1..3: mod_base = OTHER; note = phosphorothioate linkage
  modified_base 19..21: mod_base = OTHER; note = phosphorothioate linkage
tgcattatgggaaagccaatt

SEQ ID NO: 288 - RNA, 21 nt, synthetic construct
  source 1..21: mol_type = other RNA
  modified_base 1..2: mod_base = OTHER; note = 2'-fluoro ribonucleotide
  modified_base 3..13: mod_base = OTHER; note = 2'-O-methyl ribonucleotide
  modified_base 14: mod_base = OTHER; note = 2'-fluoro ribonucleotide
  modified_base 15..21: mod_base = OTHER; note = 2'-O-methyl ribonucleotide
  modified_base 1..3: mod_base = OTHER; note = phosphorothioate linkage
  modified_base 19..21: mod_base = OTHER; note = phosphorothioate linkage
tgaagccgactgggcagggtt

SEQ ID NO: 289 - RNA, 21 nt, synthetic construct
  source 1..21: mol_type = other RNA
  modified_base 1..2: mod_base = OTHER; note = 2'-fluoro ribonucleotide
  modified_base 3..13: mod_base = OTHER; note = 2'-O-methyl ribonucleotide
  modified_base 14: mod_base = OTHER; note = 2'-fluoro ribonucleotide
  modified_base 15..21: mod_base = OTHER; note = 2'-O-methyl ribonucleotide
  modified_base 1..3: mod_base = OTHER; note = phosphorothioate linkage
  modified_base 19..21: mod_base = OTHER; note = phosphorothioate linkage
tagaagccgactgggcaggtt

SEQ ID NO: 290 - RNA, 21 nt, synthetic construct
  source 1..21: mol_type = other RNA
  modified_base 1..2: mod_base = OTHER; note = 2'-fluoro ribonucleotide
  modified_base 3..13: mod_base = OTHER; note = 2'-O-methyl ribonucleotide
  modified_base 14: mod_base = OTHER; note = 2'-fluoro ribonucleotide
  modified_base 15..21: mod_base = OTHER; note = 2'-O-methyl ribonucleotide
  modified_base 1..3: mod_base = OTHER; note = phosphorothioate linkage
  modified_base 19..21: mod_base = OTHER; note = phosphorothioate linkage
tgaagaagccgactgggcatt

SEQ ID NO: 291 - RNA, 21 nt, synthetic construct
  source 1..21: mol_type = other RNA
  modified_base 1..2: mod_base = OTHER; note = 2'-fluoro ribonucleotide
  modified_base 3..13: mod_base = OTHER; note = 2'-O-methyl ribonucleotide
  modified_base 14: mod_base = OTHER; note = 2'-fluoro ribonucleotide
  modified_base 15..21: mod_base = OTHER; note = 2'-O-methyl ribonucleotide
  modified_base 1..3: mod_base = OTHER; note = phosphorothioate linkage
  modified_base 19..21: mod_base = OTHER; note = phosphorothioate linkage
tagaagaagccgactgggctt

SEQ ID NO: 292 - RNA, 21 nt, synthetic construct
  source 1..21: mol_type = other RNA
  modified_base 1..2: mod_base = OTHER; note = 2'-fluoro ribonucleotide
  modified_base 3..13: mod_base = OTHER; note = 2'-O-methyl ribonucleotide
  modified_base 14: mod_base = OTHER; note = 2'-fluoro ribonucleotide
  modified_base 15..21: mod_base = OTHER; note = 2'-O-methyl ribonucleotide
  modified_base 1..3: mod_base = OTHER; note = phosphorothioate linkage
  modified_base 19..21: mod_base = OTHER; note = phosphorothioate linkage
tggagaagaagccgactggtt

SEQ ID NO: 293 - RNA, 21 nt, synthetic construct
  source 1..21: mol_type = other RNA
  modified_base 1..2: mod_base = OTHER; note = 2'-fluoro ribonucleotide
  modified_base 3..13: mod_base = OTHER; note = 2'-O-methyl ribonucleotide
  modified_base 14: mod_base = OTHER; note = 2'-fluoro ribonucleotide
  modified_base 15..21: mod_base = OTHER; note = 2'-O-methyl ribonucleotide
  modified_base 1..3: mod_base = OTHER; note = phosphorothioate linkage
  modified_base 19..21: mod_base = OTHER; note = phosphorothioate linkage
ttggagaagaagccgactgtt

SEQ ID NO: 294 - RNA, 21 nt, synthetic construct
  source 1..21: mol_type = other RNA
  modified_base 1..2: mod_base = OTHER; note = 2'-fluoro ribonucleotide
  modified_base 3..13: mod_base = OTHER; note = 2'-O-methyl ribonucleotide
  modified_base 14: mod_base = OTHER; note = 2'-fluoro ribonucleotide
  modified_base 15..21: mod_base = OTHER; note = 2'-O-methyl ribonucleotide
  modified_base 1..3: mod_base = OTHER; note = phosphorothioate linkage
  modified_base 19..21: mod_base = OTHER; note = phosphorothioate linkage
tttggagaagaagccgacttt

SEQ ID NO: 295 - RNA, 21 nt, synthetic construct
  source 1..21: mol_type = other RNA
  modified_base 1..2: mod_base = OTHER; note = 2'-fluoro ribonucleotide
  modified_base 3..13: mod_base = OTHER; note = 2'-O-methyl ribonucleotide
  modified_base 14: mod_base = OTHER; note = 2'-fluoro ribonucleotide
  modified_base 15..21: mod_base = OTHER; note = 2'-O-methyl ribonucleotide
  modified_base 1..3: mod_base = OTHER; note = phosphorothioate linkage
  modified_base 19..21: mod_base = OTHER; note = phosphorothioate linkage
tctcctgcactggagcagctt

SEQ ID NO: 296 - RNA, 21 nt, synthetic construct
  source 1..21: mol_type = other RNA
  modified_base 1..2: mod_base = OTHER; note = 2'-fluoro ribonucleotide
  modified_base 3..13: mod_base = OTHER; note = 2'-O-methyl ribonucleotide
  modified_base 14: mod_base = OTHER; note = 2'-fluoro ribonucleotide
  modified_base 15..21: mod_base = OTHER; note = 2'-O-methyl ribonucleotide
  modified_base 1..3: mod_base = OTHER; note = phosphorothioate linkage
  modified_base 19..21: mod_base = OTHER; note = phosphorothioate linkage
ttctcctgcactggagcagtt

SEQ ID NO: 297 - RNA, 21 nt, synthetic construct
  source 1..21: mol_type = other RNA
  modified_base 1..2: mod_base = OTHER; note = 2'-fluoro ribonucleotide
  modified_base 3..13: mod_base = OTHER; note = 2'-O-methyl ribonucleotide
  modified_base 14: mod_base = OTHER; note = 2'-fluoro ribonucleotide
  modified_base 15..21: mod_base = OTHER; note = 2'-O-methyl ribonucleotide
  modified_base 1..3: mod_base = OTHER; note = phosphorothioate linkage
  modified_base 19..21: mod_base = OTHER; note = phosphorothioate linkage
tctgcactgagatgcgacttt

SEQ ID NO: 298 - RNA, 21 nt, synthetic construct
  source 1..21: mol_type = other RNA
  modified_base 1..2: mod_base = OTHER; note = 2'-fluoro ribonucleotide
  modified_base 3..13: mod_base = OTHER; note = 2'-O-methyl ribonucleotide
  modified_base 14: mod_base = OTHER; note = 2'-fluoro ribonucleotide
  modified_base 15..21: mod_base = OTHER; note = 2'-O-methyl ribonucleotide
  modified_base 1..3: mod_base = OTHER; note = phosphorothioate linkage
  modified_base 19..21: mod_base = OTHER; note = phosphorothioate linkage
ttcctgcactgagatgcgatt

SEQ ID NO: 299 - RNA, 21 nt, synthetic construct
  source 1..21: mol_type = other RNA
  modified_base 1..2: mod_base = OTHER; note = 2'-fluoro ribonucleotide
  modified_base 3..13: mod_base = OTHER; note = 2'-O-methyl ribonucleotide
  modified_base 14: mod_base = OTHER; note = 2'-fluoro ribonucleotide
  modified_base 15..21: mod_base = OTHER; note = 2'-O-methyl ribonucleotide
  modified_base 1..3: mod_base = OTHER; note = phosphorothioate linkage
  modified_base 19..21: mod_base = OTHER; note = phosphorothioate linkage
tgagaagaagccgactgggtt

SEQ ID NO: 300 - RNA, 21 nt, synthetic construct
  source 1..21: mol_type = other RNA
  modified_base 1..2: mod_base = OTHER; note = 2'-fluoro ribonucleotide
  modified_base 3..13: mod_base = OTHER; note = 2'-O-methyl ribonucleotide
  modified_base 14: mod_base = OTHER; note = 2'-fluoro ribonucleotide
  modified_base 15..21: mod_base = OTHER; note = 2'-O-methyl ribonucleotide
  modified_base 1..3: mod_base = OTHER; note = phosphorothioate linkage
  modified_base 19..21: mod_base = OTHER; note = phosphorothioate linkage
tgaagccgactgggcagggtt

SEQ ID NO: 301 - RNA, 21 nt, synthetic construct
  source 1..21: mol_type = other RNA
  modified_base 1..2: mod_base = OTHER; note = 2'-fluoro ribonucleotide
  modified_base 3..13: mod_base = OTHER; note = 2'-O-methyl ribonucleotide
  modified_base 14: mod_base = OTHER; note = 2'-fluoro ribonucleotide
  modified_base 15..21: mod_base = OTHER; note = 2'-O-methyl ribonucleotide
  modified_base 1..3: mod_base = OTHER; note = phosphorothioate linkage
  modified_base 19..21: mod_base = OTHER; note = phosphorothioate linkage
tagaagccgactgggcaggtt

SEQ ID NO: 302 - RNA, 21 nt, synthetic construct
  source 1..21: mol_type = other RNA
  modified_base 1..2: mod_base = OTHER; note = 2'-fluoro ribonucleotide
  modified_base 3..13: mod_base = OTHER; note = 2'-O-methyl ribonucleotide
  modified_base 14: mod_base = OTHER; note = 2'-fluoro ribonucleotide
  modified_base 15..21: mod_base = OTHER; note = 2'-O-methyl ribonucleotide
  modified_base 1..3: mod_base = OTHER; note = phosphorothioate linkage
  modified_base 19..21: mod_base = OTHER; note = phosphorothioate linkage
tgaagaagccgactgggcatt

SEQ ID NO: 303 - RNA, 21 nt, synthetic construct
  source 1..21: mol_type = other RNA
  modified_base 1..2: mod_base = OTHER; note = 2'-fluoro ribonucleotide
  modified_base 3..13: mod_base = OTHER; note = 2'-O-methyl ribonucleotide
  modified_base 14: mod_base = OTHER; note = 2'-fluoro ribonucleotide
  modified_base 15..21: mod_base = OTHER; note = 2'-O-methyl ribonucleotide
  modified_base 1..3: mod_base = OTHER; note = phosphorothioate linkage
  modified_base 19..21: mod_base = OTHER; note = phosphorothioate linkage
tagaagaagccgactgggctt

SEQ ID NO: 304 - RNA, 21 nt, synthetic construct
  source 1..21: mol_type = other RNA
  modified_base 1..2: mod_base = OTHER; note = 2'-fluoro ribonucleotide
  modified_base 3..13: mod_base = OTHER; note = 2'-O-methyl ribonucleotide
  modified_base 14: mod_base = OTHER; note = 2'-fluoro ribonucleotide
  modified_base 15..21: mod_base = OTHER; note = 2'-O-methyl ribonucleotide
  modified_base 1..3: mod_base = OTHER; note = phosphorothioate linkage
  modified_base 19..21: mod_base = OTHER; note = phosphorothioate linkage
tgagaagaagccgactgggtt

SEQ ID NO: 305 - RNA, 21 nt, synthetic construct
  source 1..21: mol_type = other RNA
  modified_base 1..2: mod_base = OTHER; note = 2'-fluoro ribonucleotide
  modified_base 3..13: mod_base = OTHER; note = 2'-O-methyl ribonucleotide
  modified_base 14: mod_base = OTHER; note = 2'-fluoro ribonucleotide
  modified_base 15..21: mod_base = OTHER; note = 2'-O-methyl ribonucleotide
  modified_base 1..3: mod_base = OTHER; note = phosphorothioate linkage
  modified_base 19..21: mod_base = OTHER; note = phosphorothioate linkage
tggagaagaagccgactggtt

SEQ ID NO: 306 - RNA, 21 nt, synthetic construct
  source 1..21: mol_type = other RNA
  modified_base 1..2: mod_base = OTHER; note = 2'-fluoro ribonucleotide
  modified_base 3..13: mod_base = OTHER; note = 2'-O-methyl ribonucleotide
  modified_base 14: mod_base = OTHER; note = 2'-fluoro ribonucleotide
  modified_base 15..21: mod_base = OTHER; note = 2'-O-methyl ribonucleotide
  modified_base 1..3: mod_base = OTHER; note = phosphorothioate linkage
  modified_base 19..21: mod_base = OTHER; note = phosphorothioate linkage
ttggagaagaagccgactgtt

SEQ ID NO: 307 - RNA, 21 nt, synthetic construct
  source 1..21: mol_type = other RNA
  modified_base 1..2: mod_base = OTHER; note = 2'-fluoro ribonucleotide
  modified_base 3..13: mod_base = OTHER; note = 2'-O-methyl ribonucleotide
  modified_base 14: mod_base = OTHER; note = 2'-fluoro ribonucleotide
  modified_base 15..21: mod_base = OTHER; note = 2'-O-methyl ribonucleotide
  modified_base 1..3: mod_base = OTHER; note = phosphorothioate linkage
  modified_base 19..21: mod_base = OTHER; note = phosphorothioate linkage
tctcctgcactggagcagctt

SEQ ID NO: 308 - RNA, 21 nt, synthetic construct
  source 1..21: mol_type = other RNA
  modified_base 1..2: mod_base = OTHER; note = 2'-fluoro ribonucleotide
  modified_base 3..13: mod_base = OTHER; note = 2'-O-methyl ribonucleotide
  modified_base 14: mod_base = OTHER; note = 2'-fluoro ribonucleotide
  modified_base 15..21: mod_base = OTHER; note = 2'-O-methyl ribonucleotide
  modified_base 1..3: mod_base = OTHER; note = phosphorothioate linkage
  modified_base 19..21: mod_base = OTHER; note = phosphorothioate linkage
ttctcctgcactggagcagtt

SEQ ID NO: 309 - RNA, 21 nt, synthetic construct
  source 1..21: mol_type = other RNA
  modified_base 1..2: mod_base = OTHER; note = 2'-fluoro ribonucleotide
  modified_base 3..13: mod_base = OTHER; note = 2'-O-methyl ribonucleotide
  modified_base 14: mod_base = OTHER; note = 2'-fluoro ribonucleotide
  modified_base 15..21: mod_base = OTHER; note = 2'-O-methyl ribonucleotide
  modified_base 1..3: mod_base = OTHER; note = phosphorothioate linkage
  modified_base 19..21: mod_base = OTHER; note = phosphorothioate linkage
tctgcactgagatgcgacttt

SEQ ID NO: 310 - RNA, 21 nt, synthetic construct
  source 1..21: mol_type = other RNA
  modified_base 1..2: mod_base = OTHER; note = 2'-fluoro ribonucleotide
  modified_base 3..13: mod_base = OTHER; note = 2'-O-methyl ribonucleotide
  modified_base 14: mod_base = OTHER; note = 2'-fluoro ribonucleotide
  modified_base 15..21: mod_base = OTHER; note = 2'-O-methyl ribonucleotide
  modified_base 1..3: mod_base = OTHER; note = phosphorothioate linkage
  modified_base 19..21: mod_base = OTHER; note = phosphorothioate linkage
ttcctgcactgagatgcgatt

SEQ ID NO: 311 - RNA, 21 nt, synthetic construct
  source 1..21: mol_type = other RNA
  modified_base 1: mod_base = OTHER; note = 2'-O-methyl ribonucleotide
  modified_base 2: mod_base = OTHER; note = 2'-fluoro ribonucleotide
  modified_base 3..13: mod_base = OTHER; note = 2'-O-methyl ribonucleotide
  modified_base 14: mod_base = OTHER; note = 2'-fluoro ribonucleotide
  modified_base 15..21: mod_base = OTHER; note = 2'-O-methyl ribonucleotide
  modified_base 1..3: mod_base = OTHER; note = phosphorothioate linkage
  modified_base 19..21: mod_base = OTHER; note = phosphorothioate linkage
tttggagaagaagccgacttt

SEQ ID NO: 312 - RNA, 19 nt, synthetic construct
  source 1..19: mol_type = other RNA
  modified_base 1..2: mod_base = OTHER; note = 2'-O-methyl ribonucleotide
  modified_base 3: mod_base = OTHER; note = 2'-fluoro ribonucleotide
  modified_base 4..6: mod_base = OTHER; note = 2'-O-methyl ribonucleotide
  modified_base 7..9: mod_base = OTHER; note = 2'-fluoro ribonucleotide
  modified_base 10..11: mod_base = OTHER; note = 2'-O-methyl ribonucleotide
  modified_base 12: mod_base = OTHER; note = 2'-fluoro ribonucleotide
  modified_base 13..16: mod_base = OTHER; note = 2'-O-methyl ribonucleotide
  modified_base 17: mod_base = OTHER; note = 2'-fluoro ribonucleotide
  modified_base 18..19: mod_base = OTHER; note = 2'-O-methyl ribonucleotide
  modified_base 1..3: mod_base = OTHER; note = phosphorothioate linkage
gagtcgcatctcagtgcaa

SEQ ID NO: 313 - RNA, 19 nt, synthetic construct
  source 1..19: mol_type = other RNA
  modified_base 1..2: mod_base = OTHER; note = 2'-O-methyl ribonucleotide
  modified_base 3: mod_base = OTHER; note = 2'-fluoro ribonucleotide
  modified_base 4..6: mod_base = OTHER; note = 2'-O-methyl ribonucleotide
  modified_base 7..9: mod_base = OTHER; note = 2'-fluoro ribonucleotide
  modified_base 10..11: mod_base = OTHER; note = 2'-O-methyl ribonucleotide
  modified_base 12: mod_base = OTHER; note = 2'-fluoro ribonucleotide
  modified_base 13..16: mod_base = OTHER; note = 2'-O-methyl ribonucleotide
  modified_base 17: mod_base = OTHER; note = 2'-fluoro ribonucleotide
  modified_base 18..19: mod_base = OTHER; note = 2'-O-methyl ribonucleotide
  modified_base 1..3: mod_base = OTHER; note = phosphorothioate linkage
gtcgcatctcagtgcagga

SEQ ID NO: 314 - RNA, 19 nt, synthetic construct
  source 1..19: mol_type = other RNA
  modified_base 1..2: mod_base = OTHER; note = 2'-O-methyl ribonucleotide
  modified_base 3: mod_base = OTHER; note = 2'-fluoro ribonucleotide
  modified_base 4..6: mod_base = OTHER; note = 2'-O-methyl ribonucleotide
  modified_base 7..9: mod_base = OTHER; note = 2'-fluoro ribonucleotide
  modified_base 10..11: mod_base = OTHER; note = 2'-O-methyl ribonucleotide
  modified_base 12: mod_base = OTHER; note = 2'-fluoro ribonucleotide
  modified_base 13..16: mod_base = OTHER; note = 2'-O-methyl ribonucleotide
  modified_base 17: mod_base = OTHER; note = 2'-fluoro ribonucleotide
  modified_base 18..19: mod_base = OTHER; note = 2'-O-methyl ribonucleotide
  modified_base 1..3: mod_base = OTHER; note = phosphorothioate linkage
agaacctctcacttcacca

SEQ ID NO: 315 - RNA, 19 nt, synthetic construct
  source 1..19: mol_type = other RNA
  modified_base 1..2: mod_base = OTHER; note = 2'-O-methyl ribonucleotide
  modified_base 3: mod_base = OTHER; note = 2'-fluoro ribonucleotide
  modified_base 4..6: mod_base = OTHER; note = 2'-O-methyl ribonucleotide
  modified_base 7..9: mod_base = OTHER; note = 2'-fluoro ribonucleotide
  modified_base 10..11: mod_base = OTHER; note = 2'-O-methyl ribonucleotide
  modified_base 12: mod_base = OTHER; note = 2'-fluoro ribonucleotide
  modified_base 13..16: mod_base = OTHER; note = 2'-O-methyl ribonucleotide
  modified_base 17: mod_base = OTHER; note = 2'-fluoro ribonucleotide
  modified_base 18..19: mod_base = OTHER; note = 2'-O-methyl ribonucleotide
  modified_base 1..3: mod_base = OTHER; note = phosphorothioate linkage
gaacctctcacttcaccca

SEQ ID NO: 316 - RNA, 19 nt, synthetic construct
  source 1..19: mol_type = other RNA
  modified_base 1..2: mod_base = OTHER; note = 2'-O-methyl ribonucleotide
  modified_base 3: mod_base = OTHER; note = 2'-fluoro ribonucleotide
  modified_base 4..6: mod_base = OTHER; note = 2'-O-methyl ribonucleotide
  modified_base 7..9: mod_base = OTHER; note = 2'-fluoro ribonucleotide
  modified_base 10..11: mod_base = OTHER; note = 2'-O-methyl ribonucleotide
  modified_base 12: mod_base = OTHER; note = 2'-fluoro ribonucleotide
  modified_base 13..16: mod_base = OTHER; note = 2'-O-methyl ribonucleotide
  modified_base 17: mod_base = OTHER; note = 2'-fluoro ribonucleotide
  modified_base 18..19: mod_base = OTHER; note = 2'-O-methyl ribonucleotide
  modified_base 1..3: mod_base = OTHER; note = phosphorothioate linkage
agtctcccaacttgtatta

SEQ ID NO: 317 - RNA, 19 nt, synthetic construct
  source 1..19: mol_type = other RNA
  modified_base 1..2: mod_base = OTHER; note = 2'-O-methyl ribonucleotide
  modified_base 3: mod_base = OTHER; note = 2'-fluoro ribonucleotide
  modified_base 4..6: mod_base = OTHER; note = 2'-O-methyl ribonucleotide
  modified_base 7..9: mod_base = OTHER; note = 2'-fluoro ribonucleotide
  modified_base 10..11: mod_base = OTHER; note = 2'-O-methyl ribonucleotide
  modified_base 12: mod_base = OTHER; note = 2'-fluoro ribonucleotide
  modified_base 13..16: mod_base = OTHER; note = 2'-O-methyl ribonucleotide
  modified_base 17: mod_base = OTHER; note = 2'-fluoro ribonucleotide
  modified_base 18..19: mod_base = OTHER; note = 2'-O-methyl ribonucleotide
  modified_base 1..3: mod_base = OTHER; note = phosphorothioate linkage
ggaagctgcttaactgtca

SEQ ID NO: 318 - RNA, 19 nt, synthetic construct
  source 1..19: mol_type = other RNA
  modified_base 1..2: mod_base = OTHER; note = 2'-O-methyl ribonucleotide
  modified_base 3: mod_base = OTHER; note = 2'-fluoro ribonucleotide
  modified_base 4..6: mod_base = OTHER; note = 2'-O-methyl ribonucleotide
  modified_base 7..9: mod_base = OTHER; note = 2'-fluoro ribonucleotide
  modified_base 10..11: mod_base = OTHER; note = 2'-O-methyl ribonucleotide
  modified_base 12: mod_base = OTHER; note = 2'-fluoro ribonucleotide
  modified_base 13..16: mod_base = OTHER; note = 2'-O-methyl ribonucleotide
  modified_base 17: mod_base = OTHER; note = 2'-fluoro ribonucleotide
  modified_base 18..19: mod_base = OTHER; note = 2'-O-methyl ribonucleotide
  modified_base 1..3: mod_base = OTHER; note = phosphorothioate linkage
gcaggagactggctaaata

SEQ ID NO: 319 - RNA, 19 nt, synthetic construct
  source 1..19: mol_type = other RNA
  modified_base 1..2: mod_base = OTHER; note = 2'-O-methyl ribonucleotide
  modified_base 3: mod_base = OTHER; note = 2'-fluoro ribonucleotide
  modified_base 4..6: mod_base = OTHER; note = 2'-O-methyl ribonucleotide
  modified_base 7..9: mod_base = OTHER; note = 2'-fluoro ribonucleotide
  modified_base 10..11: mod_base = OTHER; note = 2'-O-methyl ribonucleotide
  modified_base 12: mod_base = OTHER; note = 2'-fluoro ribonucleotide
  modified_base 13..16: mod_base = OTHER; note = 2'-O-methyl ribonucleotide
  modified_base 17: mod_base = OTHER; note = 2'-fluoro ribonucleotide
  modified_base 18..19: mod_base = OTHER; note = 2'-O-methyl ribonucleotide
  modified_base 1..3: mod_base = OTHER; note = phosphorothioate linkage
ttatcctttggtttcttga

SEQ ID NO: 320 - RNA, 21 nt, synthetic construct
  source 1..21: mol_type = other RNA
  modified_base 1..2: mod_base = OTHER; note = 2'-O-methyl ribonucleotide
  modified_base 3: mod_base = OTHER; note = 2'-fluoro ribonucleotide
  modified_base 4..6: mod_base = OTHER; note = 2'-O-methyl ribonucleotide
  modified_base 7..9: mod_base = OTHER; note = 2'-fluoro ribonucleotide
  modified_base 10..11: mod_base = OTHER; note = 2'-O-methyl ribonucleotide
  modified_base 12: mod_base = OTHER; note = 2'-fluoro ribonucleotide
  modified_base 13..16: mod_base = OTHER; note = 2'-O-methyl ribonucleotide
  modified_base 17: mod_base = OTHER; note = 2'-fluoro ribonucleotide
  modified_base 18..21: mod_base = OTHER; note = 2'-O-methyl ribonucleotide
  modified_base 1..3: mod_base = OTHER; note = phosphorothioate linkage
gtgtgttacgtgcagtgaatt

SEQ ID NO: 321 - RNA, 19 nt, synthetic construct
  source 1..19: mol_type = other RNA
  modified_base 1..2: mod_base = OTHER; note = 2'-O-methyl ribonucleotide
  modified_base 3: mod_base = OTHER; note = 2'-fluoro ribonucleotide
  modified_base 4..6: mod_base = OTHER; note = 2'-O-methyl ribonucleotide
  modified_base 7..9: mod_base = OTHER; note = 2'-fluoro ribonucleotide
  modified_base 10..11: mod_base = OTHER; note = 2'-O-methyl ribonucleotide
  modified_base 12: mod_base = OTHER; note = 2'-fluoro ribonucleotide
  modified_base 13..16: mod_base = OTHER; note = 2'-O-methyl ribonucleotide
  modified_base 17: mod_base = OTHER; note = 2'-fluoro ribonucleotide
  modified_base 18..19: mod_base = OTHER; note = 2'-O-methyl ribonucleotide
  modified_base 1..3: mod_base = OTHER; note = phosphorothioate linkage
tgttccactgggctgagaa

SEQ ID NO: 322 - RNA, 21 nt, synthetic construct
  source 1..21: mol_type = other RNA
  modified_base 1..2: mod_base = OTHER; note = 2'-O-methyl ribonucleotide
  modified_base 3: mod_base = OTHER; note = 2'-fluoro ribonucleotide
  modified_base 4..6: mod_base = OTHER; note = 2'-O-methyl ribonucleotide
  modified_base 7..9: mod_base = OTHER; note = 2'-fluoro ribonucleotide
  modified_base 10..11: mod_base = OTHER; note = 2'-O-methyl ribonucleotide
  modified_base 12: mod_base = OTHER; note = 2'-fluoro ribonucleotide
  modified_base 13..16: mod_base = OTHER; note = 2'-O-methyl ribonucleotide
  modified_base 17: mod_base = OTHER; note = 2'-fluoro ribonucleotide
  modified_base 18..21: mod_base = OTHER; note = 2'-O-methyl ribonucleotide
  modified_base 1..3: mod_base = OTHER; note = phosphorothioate linkage
gcgaattcctagacacctatt

SEQ ID NO: 323 - RNA, 21 nt, synthetic construct
  source 1..21: mol_type = other RNA
  modified_base 1..2: mod_base = OTHER; note = 2'-O-methyl ribonucleotide
  modified_base 3: mod_base = OTHER; note = 2'-fluoro ribonucleotide
  modified_base 4..6: mod_base = OTHER; note = 2'-O-methyl ribonucleotide
  modified_base 7..9: mod_base = OTHER; note = 2'-fluoro ribonucleotide
  modified_base 10..11: mod_base = OTHER; note = 2'-O-methyl ribonucleotide
  modified_base 12: mod_base = OTHER; note = 2'-fluoro ribonucleotide
  modified_base 13..16: mod_base = OTHER; note = 2'-O-methyl ribonucleotide
  modified_base 17: mod_base = OTHER; note = 2'-fluoro ribonucleotide
  modified_base 18..21: mod_base = OTHER; note = 2'-O-methyl ribonucleotide
  modified_base 1..3: mod_base = OTHER; note = phosphorothioate linkage
gtgtgttacgtgcagtgacta

SEQ ID NO: 324 - RNA, 21 nt, synthetic construct
  source 1..21: mol_type = other RNA
  modified_base 1..2: mod_base = OTHER; note = 2'-O-methyl ribonucleotide
  modified_base 3: mod_base = OTHER; note = 2'-fluoro ribonucleotide
  modified_base 4..6: mod_base = OTHER; note = 2'-O-methyl ribonucleotide
  modified_base 7..9: mod_base = OTHER; note = 2'-fluoro ribonucleotide
  modified_base 10..11: mod_base = OTHER; note = 2'-O-methyl ribonucleotide
  modified_base 12: mod_base = OTHER; note = 2'-fluoro ribonucleotide
  modified_base 13..16: mod_base = OTHER; note = 2'-O-methyl ribonucleotide
  modified_base 17: mod_base = OTHER; note = 2'-fluoro ribonucleotide
  modified_base 18..21: mod_base = OTHER; note = 2'-O-methyl ribonucleotide
  modified_base 1..3: mod_base = OTHER; note = phosphorothioate linkage
actacaagactcgtgaccatt

SEQ ID NO: 325 - RNA, 21 nt, synthetic construct
  source 1..21: mol_type = other RNA
  modified_base 1: mod_base = OTHER; note = 2'-fluoro ribonucleotide
  modified_base 2: mod_base = OTHER; note = 2'-O-methyl ribonucleotide
  modified_base 3: mod_base = OTHER; note = 2'-fluoro ribonucleotide
  modified_base 4: mod_base = OTHER; note = 2'-O-methyl ribonucleotide
  modified_base 5: mod_base = OTHER; note = 2'-fluoro ribonucleotide
  modified_base 6: mod_base = OTHER; note = 2'-O-methyl ribonucleotide
  modified_base 7: mod_base = OTHER; note = 2'-fluoro ribonucleotide
  modified_base 8: mod_base = OTHER; note = 2'-O-methyl ribonucleotide
  modified_base 9: mod_base = OTHER; note = 2'-fluoro ribonucleotide
  modified_base 10: mod_base = OTHER; note = 2'-O-methyl ribonucleotide
  modified_base 11: mod_base = OTHER; note = 2'-fluoro ribonucleotide
  modified_base 12: mod_base = OTHER; note = 2'-O-methyl ribonucleotide
  modified_base 13: mod_base = OTHER; note = 2'-fluoro ribonucleotide
  modified_base 14: mod_base = OTHER; note = 2'-O-methyl ribonucleotide
  modified_base 15: mod_base = OTHER; note = 2'-fluoro ribonucleotide
  modified_base 16: mod_base = OTHER; note = 2'-O-methyl ribonucleotide
  modified_base 17: mod_base = OTHER; note = 2'-fluoro ribonucleotide
  modified_base 18: mod_base = OTHER; note = 2'-O-methyl ribonucleotide
  modified_base 19: mod_base = OTHER; note = 2'-fluoro ribonucleotide
  modified_base 20..21: mod_base = OTHER; note = 2'-O-methyl ribonucleotide
  modified_base 1..3: mod_base = OTHER; note = phosphorothioate linkage
gtgtgttacgtgcagtgaatt

SEQ ID NO: 326 - RNA, 21 nt, synthetic construct
  source 1..21: mol_type = other RNA
  modified_base 1: mod_base = OTHER; note = 2'-fluoro ribonucleotide
  modified_base 2: mod_base = OTHER; note = 2'-O-methyl ribonucleotide
  modified_base 3: mod_base = OTHER; note = 2'-fluoro ribonucleotide
  modified_base 4: mod_base = OTHER; note = 2'-O-methyl ribonucleotide
  modified_base 5: mod_base = OTHER; note = 2'-fluoro ribonucleotide
  modified_base 6: mod_base = OTHER; note = 2'-O-methyl ribonucleotide
  modified_base 7: mod_base = OTHER; note = 2'-fluoro ribonucleotide
  modified_base 8: mod_base = OTHER; note = 2'-O-methyl ribonucleotide
  modified_base 9: mod_base = OTHER; note = 2'-fluoro ribonucleotide
  modified_base 10: mod_base = OTHER; note = 2'-O-methyl ribonucleotide
  modified_base 11: mod_base = OTHER; note = 2'-fluoro ribonucleotide
  modified_base 12: mod_base = OTHER; note = 2'-O-methyl ribonucleotide
  modified_base 13: mod_base = OTHER; note = 2'-fluoro ribonucleotide
  modified_base 14: mod_base = OTHER; note = 2'-O-methyl ribonucleotide
  modified_base 15: mod_base = OTHER; note = 2'-fluoro ribonucleotide
  modified_base 16: mod_base = OTHER; note = 2'-O-methyl ribonucleotide
  modified_base 17: mod_base = OTHER; note = 2'-fluoro ribonucleotide
  modified_base 18: mod_base = OTHER; note = 2'-O-methyl ribonucleotide
  modified_base 19: mod_base = OTHER; note = 2'-fluoro ribonucleotide
  modified_base 20..21: mod_base = OTHER; note = 2'-O-methyl ribonucleotide
  modified_base 1..3: mod_base = OTHER; note = phosphorothioate linkage
gcgaattcctagacacctatt

SEQ ID NO: 327 - RNA, 21 nt, synthetic construct
  source 1..21: mol_type = other RNA
  modified_base 1: mod_base = OTHER; note = 2'-fluoro ribonucleotide
  modified_base 2: mod_base = OTHER; note = 2'-O-methyl ribonucleotide
  modified_base 3: mod_base = OTHER; note = 2'-fluoro ribonucleotide
  modified_base 4: mod_base = OTHER; note = 2'-O-methyl ribonucleotide
  modified_base 5: mod_base = OTHER; note = 2'-fluoro ribonucleotide
  modified_base 6: mod_base = OTHER; note = 2'-O-methyl ribonucleotide
  modified_base 7: mod_base = OTHER; note = 2'-fluoro ribonucleotide
  modified_base 8: mod_base = OTHER; note = 2'-O-methyl ribonucleotide
  modified_base 9: mod_base = OTHER; note = 2'-fluoro ribonucleotide
  modified_base 10: mod_base = OTHER; note = 2'-O-methyl ribonucleotide
  modified_base 11: mod_base = OTHER; note = 2'-fluoro ribonucleotide
  modified_base 12: mod_base = OTHER; note = 2'-O-methyl ribonucleotide
  modified_base 13: mod_base = OTHER; note = 2'-fluoro ribonucleotide
  modified_base 14: mod_base = OTHER; note = 2'-O-methyl ribonucleotide
  modified_base 15: mod_base = OTHER; note = 2'-fluoro ribonucleotide
  modified_base 16: mod_base = OTHER; note = 2'-O-methyl ribonucleotide
  modified_base 17: mod_base = OTHER; note = 2'-fluoro ribonucleotide
  modified_base 18: mod_base = OTHER; note = 2'-O-methyl ribonucleotide
  modified_base 19: mod_base = OTHER; note = 2'-fluoro ribonucleotide
  modified_base 20..21: mod_base = OTHER; note = 2'-O-methyl ribonucleotide
  modified_base 1..3: mod_base = OTHER; note = phosphorothioate linkage
gtgtgttacgtgcagtgacta

SEQ ID NO: 328 - RNA, 19 nt, synthetic construct
  source 1..19: mol_type = other RNA
  modified_base 1..2: mod_base = OTHER; note = 2'-O-methyl ribonucleotide
  modified_base 3: mod_base = OTHER; note = 2'-fluoro ribonucleotide
  modified_base 4..6: mod_base = OTHER; note = 2'-O-methyl ribonucleotide
  modified_base 7..9: mod_base = OTHER; note = 2'-fluoro ribonucleotide
  modified_base 10..11: mod_base = OTHER; note = 2'-O-methyl ribonucleotide
  modified_base 12: mod_base = OTHER; note = 2'-fluoro ribonucleotide
  modified_base 13..16: mod_base = OTHER; note = 2'-O-methyl ribonucleotide
  modified_base 17: mod_base = OTHER; note = 2'-fluoro ribonucleotide
  modified_base 18..19: mod_base = OTHER; note = 2'-O-methyl ribonucleotide
  modified_base 1..3: mod_base = OTHER; note = phosphorothioate linkage
tccttgcggtgaaagcgaa

SEQ ID NO: 329 - RNA, 19 nt, synthetic construct
  source 1..19: mol_type = other RNA
  modified_base 1..2: mod_base = OTHER; note = 2'-O-methyl ribonucleotide
  modified_base 3: mod_base = OTHER; note = 2'-fluoro ribonucleotide
  modified_base 4..6: mod_base = OTHER; note = 2'-O-methyl ribonucleotide
  modified_base 7..9: mod_base = OTHER; note = 2'-fluoro ribonucleotide
  modified_base 10..11: mod_base = OTHER; note = 2'-O-methyl ribonucleotide
  modified_base 12: mod_base = OTHER; note = 2'-fluoro ribonucleotide
  modified_base 13..16: mod_base = OTHER; note = 2'-O-methyl ribonucleotide
  modified_base 17: mod_base = OTHER; note = 2'-fluoro ribonucleotide
  modified_base 18..19: mod_base = OTHER; note = 2'-O-methyl ribonucleotide
  modified_base 1..3: mod_base = OTHER; note = phosphorothioate linkage
gtaatatccaccagaccta

SEQ ID NO: 330 - RNA, 19 nt, synthetic construct
  source 1..19: mol_type = other RNA
  modified_base 1..2: mod_base = OTHER; note = 2'-O-methyl ribonucleotide
  modified_base 3: mod_base = OTHER; note = 2'-fluoro ribonucleotide
  modified_base 4..6: mod_base = OTHER; note = 2'-O-methyl ribonucleotide
  modified_base 7..9: mod_base = OTHER; note = 2'-fluoro ribonucleotide
  modified_base 10..11: mod_base = OTHER; note = 2'-O-methyl ribonucleotide
  modified_base 12: mod_base = OTHER; note = 2'-fluoro ribonucleotide
  modified_base 13..16: mod_base = OTHER; note = 2'-O-methyl ribonucleotide
  modified_base 17: mod_base = OTHER; note = 2'-fluoro ribonucleotide
  modified_base 18..19: mod_base = OTHER; note = 2'-O-methyl ribonucleotide
  modified_base 1..3: mod_base = OTHER; note = phosphorothioate linkage
ttgtttgtgatagtgaaca

SEQ ID NO: 331 - RNA, 19 nt, synthetic construct
  source 1..19: mol_type = other RNA
  modified_base 1..2: mod_base = OTHER; note = 2'-O-methyl ribonucleotide
  modified_base 3: mod_base = OTHER; note = 2'-fluoro ribonucleotide
  modified_base 4..6: mod_base = OTHER; note = 2'-O-methyl ribonucleotide
  modified_base 7..9: mod_base = OTHER; note = 2'-fluoro ribonucleotide
  modified_base 10..11: mod_base = OTHER; note = 2'-O-methyl ribonucleotide
  modified_base 12: mod_base = OTHER; note = 2'-fluoro ribonucleotide
  modified_base 13..16: mod_base = OTHER; note = 2'-O-methyl ribonucleotide
  modified_base 17: mod_base = OTHER; note = 2'-fluoro ribonucleotide
  modified_base 18..19: mod_base = OTHER; note = 2'-O-methyl ribonucleotide
  modified_base 1..3: mod_base = OTHER; note = phosphorothioate linkage
gctgcttaactgtccatca

SEQ ID NO: 332 - RNA, 21 nt, synthetic construct
  source 1..21: mol_type = other RNA
  modified_base 1: mod_base = OTHER; note = 2'-O methyl vinyl phosphonate uridine
  modified_base 2: mod_base = OTHER; note = 2'-fluoro ribonucleotide
  modified_base 3..13: mod_base = OTHER; note = 2'-O-methyl ribonucleotide
  modified_base 14: mod_base = OTHER; note = 2'-fluoro ribonucleotide
  modified_base 15..21: mod_base = OTHER; note = 2'-O-methyl ribonucleotide
  modified_base 1..3: mod_base = OTHER; note = phosphorothioate linkage
  modified_base 19..21: mod_base = OTHER; note = phosphorothioate linkage
ttgcactgagatgcgactctt

SEQ ID NO: 333 - RNA, 21 nt, synthetic construct
  source 1..21: mol_type = other RNA
  modified_base 1: mod_base = OTHER; note = 2'-O methyl vinyl phosphonate uridine
  modified_base 2: mod_base = OTHER; note = 2'-fluoro ribonucleotide
  modified_base 3..13: mod_base = OTHER; note = 2'-O-methyl ribonucleotide
  modified_base 14: mod_base = OTHER; note = 2'-fluoro ribonucleotide
  modified_base 15..21: mod_base = OTHER; note = 2'-O-methyl ribonucleotide
  modified_base 1..3: mod_base = OTHER; note = phosphorothioate linkage
  modified_base 19..21: mod_base = OTHER; note = phosphorothioate linkage
tcctgcactgagatgcgactt

SEQ ID NO: 334 - RNA, 21 nt, synthetic construct
  source 1..21: mol_type = other RNA
  modified_base 1: mod_base = OTHER; note = 2'-O methyl vinyl phosphonate uridine
  modified_base 2: mod_base = OTHER; note = 2'-fluoro ribonucleotide
  modified_base 3..13: mod_base = OTHER; note = 2'-O-methyl ribonucleotide
  modified_base 14: mod_base = OTHER; note = 2'-fluoro ribonucleotide
  modified_base 15..21: mod_base = OTHER; note = 2'-O-methyl ribonucleotide
  modified_base 1..3: mod_base = OTHER; note = phosphorothioate linkage
  modified_base 19..21: mod_base = OTHER; note = phosphorothioate linkage
tggtgaagtgagaggttcttt

SEQ ID NO: 335 - RNA, 21 nt, synthetic construct
  source 1..21: mol_type = other RNA
  modified_base 1: mod_base = OTHER; note = 2'-O methyl vinyl phosphonate uridine
  modified_base 2: mod_base = OTHER; note = 2'-fluoro ribonucleotide
  modified_base 3..13: mod_base = OTHER; note = 2'-O-methyl ribonucleotide
  modified_base 14: mod_base = OTHER; note = 2'-fluoro ribonucleotide
  modified_base 15..21: mod_base = OTHER; note = 2'-O-methyl ribonucleotide
  modified_base 1..3: mod_base = OTHER; note = phosphorothioate linkage
  modified_base 19..21: mod_base = OTHER; note = phosphorothioate linkage
tgggtgaagtgagaggttctt

SEQ ID NO: 336 - RNA, 21 nt, synthetic construct
  source 1..21: mol_type = other RNA
  modified_base 1: mod_base = OTHER; note = 2'-O methyl vinyl phosphonate uridine
  modified_base 2: mod_base = OTHER; note = 2'-fluoro ribonucleotide
  modified_base 3..13: mod_base = OTHER; note = 2'-O-methyl ribonucleotide
  modified_base 14: mod_base = OTHER; note = 2'-fluoro ribonucleotide
  modified_base 15..21: mod_base = OTHER; note = 2'-O-methyl ribonucleotide
  modified_base 1..3: mod_base = OTHER; note = phosphorothioate linkage
  modified_base 19..21: mod_base = OTHER; note = phosphorothioate linkage
taatacaagttgggagacttt

SEQ ID NO: 337 - RNA, 21 nt, synthetic construct
  source 1..21: mol_type = other RNA
  modified_base 1: mod_base = OTHER; note = 2'-O methyl vinyl phosphonate uridine
  modified_base 2: mod_base = OTHER; note = 2'-fluoro ribonucleotide
  modified_base 3..13: mod_base = OTHER; note = 2'-O-methyl ribonucleotide
  modified_base 14: mod_base = OTHER; note = 2'-fluoro ribonucleotide
  modified_base 15..21: mod_base = OTHER; note = 2'-O-methyl ribonucleotide
  modified_base 1..3: mod_base = OTHER; note = phosphorothioate linkage
  modified_base 19..21: mod_base = OTHER; note = phosphorothioate linkage
tgacagttaagcagcttcctt

SEQ ID NO: 338 - RNA, 21 nt, synthetic construct
  source 1..21: mol_type = other RNA
  modified_base 1: mod_base = OTHER; note = 2'-O methyl vinyl phosphonate uridine
  modified_base 2: mod_base = OTHER; note = 2'-fluoro ribonucleotide
  modified_base 3..13: mod_base = OTHER; note = 2'-O-methyl ribonucleotide
  modified_base 14: mod_base = OTHER; note = 2'-fluoro ribonucleotide
  modified_base 15..21: mod_base = OTHER; note = 2'-O-methyl ribonucleotide
  modified_base 1..3: mod_base = OTHER; note = phosphorothioate linkage
  modified_base 19..21: mod_base = OTHER; note = phosphorothioate linkage
tatttagccagtctcctgctt

SEQ ID NO: 339 - RNA, 21 nt, synthetic construct
  source 1..21: mol_type = other RNA
  modified_base 1: mod_base = OTHER; note = 2'-O methyl vinyl phosphonate uridine
  modified_base 2: mod_base = OTHER; note = 2'-fluoro ribonucleotide
  modified_base 3..13: mod_base = OTHER; note = 2'-O-methyl ribonucleotide
  modified_base 14: mod_base = OTHER; note = 2'-fluoro ribonucleotide
  modified_base 15..21: mod_base = OTHER; note = 2'-O-methyl ribonucleotide
  modified_base 1..3: mod_base = OTHER; note = phosphorothioate linkage
  modified_base 19..21: mod_base = OTHER; note = phosphorothioate linkage
tcaagaaaccaaaggataatt

SEQ ID NO: 340 - RNA, 21 nt, synthetic construct
  source 1..21: mol_type = other RNA
  modified_base 1: mod_base = OTHER; note = 2'-O methyl vinyl phosphonate uridine
  modified_base 2: mod_base = OTHER; note = 2'-fluoro ribonucleotide
  modified_base 3..13: mod_base = OTHER; note = 2'-O-methyl ribonucleotide
  modified_base 14: mod_base = OTHER; note = 2'-fluoro ribonucleotide
  modified_base 15..21: mod_base = OTHER; note = 2'-O-methyl ribonucleotide
  modified_base 1..3: mod_base = OTHER; note = phosphorothioate linkage
  modified_base 19..21: mod_base = OTHER; note = phosphorothioate linkage
ttcactgcacgtaacacactg

SEQ ID NO: 341 - RNA, 21 nt, synthetic construct
  source 1..21: mol_type = other RNA
  modified_base 1: mod_base = OTHER; note = 2'-O methyl vinyl phosphonate uridine
  modified_base 2: mod_base = OTHER; note = 2'-fluoro ribonucleotide
  modified_base 3..13: mod_base = OTHER; note = 2'-O-methyl ribonucleotide
  modified_base 14: mod_base = OTHER; note = 2'-fluoro ribonucleotide
  modified_base 15..21: mod_base = OTHER; note = 2'-O-methyl ribonucleotide
  modified_base 1..3: mod_base = OTHER; note = phosphorothioate linkage
  modified_base 19..21: mod_base = OTHER; note = phosphorothioate linkage
ttctcagcccagtggaacatt

SEQ ID NO: 342 - RNA, 21 nt, synthetic construct
  source 1..21: mol_type = other RNA
  modified_base 1: mod_base = OTHER; note = 2'-O methyl vinyl phosphonate uridine
  modified_base 2: mod_base = OTHER; note = 2'-fluoro ribonucleotide
  modified_base 3..13: mod_base = OTHER; note = 2'-O-methyl ribonucleotide
  modified_base 14: mod_base = OTHER; note = 2'-fluoro ribonucleotide
  modified_base 15..21: mod_base = OTHER; note = 2'-O-methyl ribonucleotide
  modified_base 1..3: mod_base = OTHER; note = phosphorothioate linkage
  modified_base 19..21: mod_base = OTHER; note = phosphorothioate linkage
taggtgtctcggaattcgctt

SEQ ID NO: 343 - RNA, 23 nt, synthetic construct
  source 1..23: mol_type = other RNA
  modified_base 1: mod_base = OTHER; note = 2'-O methyl vinyl phosphonate uridine
  modified_base 2: mod_base = OTHER; note = 2'-fluoro ribonucleotide
  modified_base 3..13: mod_base = OTHER; note = 2'-O-methyl ribonucleotide
  modified_base 14: mod_base = OTHER; note = 2'-fluoro ribonucleotide
  modified_base 15..23: mod_base = OTHER; note = 2'-O-methyl ribonucleotide
  modified_base 1..3: mod_base = OTHER; note = phosphorothioate linkage
  modified_base 21..23: mod_base = OTHER; note = phosphorothioate linkage
tagtcactgcacgtaacacactg

SEQ ID NO: 344 - RNA, 21 nt, synthetic construct
  source 1..21: mol_type = other RNA
  modified_base 1: mod_base = OTHER; note = 2'-O methyl vinyl phosphonate uridine
  modified_base 2: mod_base = OTHER; note = 2'-fluoro ribonucleotide
  modified_base 3..13: mod_base = OTHER; note = 2'-O-methyl ribonucleotide
  modified_base 14: mod_base = OTHER; note = 2'-fluoro ribonucleotide
  modified_base 15..21: mod_base = OTHER; note = 2'-O-methyl ribonucleotide
  modified_base 1..3: mod_base = OTHER; note = phosphorothioate linkage
  modified_base 19..21: mod_base = OTHER; note = phosphorothioate linkage
tggtcacgagtcttgtagttt

SEQ ID NO: 345 - RNA, 21 nt, synthetic construct
  source 1..21: mol_type = other RNA
  modified_base 1: mod_base = OTHER; note = 2'-O methyl vinyl phosphonate uridine
  modified_base 2: mod_base = OTHER; note = 2'-fluoro ribonucleotide
  modified_base 3: mod_base = OTHER; note = 2'-O-methyl ribonucleotide
  modified_base 4: mod_base = OTHER; note = 2'-fluoro ribonucleotide
  modified_base 5: mod_base = OTHER; note = 2'-O-methyl ribonucleotide
  modified_base 6: mod_base = OTHER; note = 2'-fluoro ribonucleotide
  modified_base 7: mod_base = OTHER; note = 2'-O-methyl ribonucleotide
  modified_base 8: mod_base = OTHER; note = 2'-fluoro ribonucleotide
  modified_base 9: mod_base = OTHER; note = 2'-O-methyl ribonucleotide
  modified_base 10: mod_base = OTHER; note = 2'-fluoro ribonucleotide
  modified_base 11: mod_base = OTHER; note = 2'-O-methyl ribonucleotide
  modified_base 12: mod_base = OTHER; note = 2'-fluoro ribonucleotide
  modified_base 13: mod_base = OTHER; note = 2'-O-methyl ribonucleotide
  modified_base 14: mod_base = OTHER; note = 2'-fluoro ribonucleotide
  modified_base 15: mod_base = OTHER; note = 2'-O-methyl ribonucleotide
  modified_base 16: mod_base = OTHER; note = 2'-fluoro ribonucleotide
  modified_base 17: mod_base = OTHER; note = 2'-O-methyl ribonucleotide
  modified_base 18: mod_base = OTHER; note = 2'-fluoro ribonucleotide
  modified_base 19..21: mod_base = OTHER; note = 2'-O-methyl ribonucleotide
  modified_base 1..3: mod_base = OTHER; note = phosphorothioate linkage
  modified_base 19..21: mod_base = OTHER; note = phosphorothioate linkage
ttcactgcacgtaacacactg

SEQ ID NO: 346 - RNA, 21 nt, synthetic construct
  source 1..21: mol_type = other RNA
  modified_base 1: mod_base = OTHER; note = 2'-O methyl vinyl phosphonate uridine
  modified_base 2: mod_base = OTHER; note = 2'-fluoro ribonucleotide
  modified_base 3: mod_base = OTHER; note = 2'-O-methyl ribonucleotide
  modified_base 4: mod_base = OTHER; note = 2'-fluoro ribonucleotide
  modified_base 5: mod_base = OTHER; note = 2'-O-methyl ribonucleotide
  modified_base 6: mod_base = OTHER; note = 2'-fluoro ribonucleotide
  modified_base 7: mod_base = OTHER; note = 2'-O-methyl ribonucleotide
  modified_base 8: mod_base = OTHER; note = 2'-fluoro ribonucleotide
  modified_base 9: mod_base = OTHER; note = 2'-O-methyl ribonucleotide
  modified_base 10: mod_base = OTHER; note = 2'-fluoro ribonucleotide
  modified_base 11: mod_base = OTHER; note = 2'-O-methyl ribonucleotide
  modified_base 12: mod_base = OTHER; note = 2'-fluoro ribonucleotide
  modified_base 13: mod_base = OTHER; note = 2'-O-methyl ribonucleotide
  modified_base 14: mod_base = OTHER; note = 2'-fluoro ribonucleotide
  modified_base 15: mod_base = OTHER; note = 2'-O-methyl ribonucleotide
  modified_base 16: mod_base = OTHER; note = 2'-fluoro ribonucleotide
  modified_base 17: mod_base = OTHER; note = 2'-O-methyl ribonucleotide
  modified_base 18: mod_base = OTHER; note = 2'-fluoro ribonucleotide
  modified_base 19..21: mod_base = OTHER; note = 2'-O-methyl ribonucleotide
  modified_base 1..3: mod_base = OTHER; note = phosphorothioate linkage
  modified_base 19..21: mod_base = OTHER; note = phosphorothioate linkage
taggtgtctcggaattcgctt

SEQ ID NO: 347 - RNA, 23 nt, synthetic construct
  source 1..23: mol_type = other RNA
  modified_base 1: mod_base = OTHER; note = 2'-O methyl vinyl phosphonate uridine
  modified_base 2: mod_base = OTHER; note = 2'-fluoro ribonucleotide
  modified_base 3: mod_base = OTHER; note = 2'-O-methyl ribonucleotide
  modified_base 4: mod_base = OTHER; note = 2'-fluoro ribonucleotide
  modified_base 5: mod_base = OTHER; note = 2'-O-methyl ribonucleotide
  modified_base 6: mod_base = OTHER; note = 2'-fluoro ribonucleotide
  modified_base 7: mod_base = OTHER; note = 2'-O-methyl ribonucleotide
  modified_base 8: mod_base = OTHER; note = 2'-fluoro ribonucleotide
  modified_base 9: mod_base = OTHER; note = 2'-O-methyl ribonucleotide
  modified_base 10: mod_base = OTHER; note = 2'-fluoro ribonucleotide
  modified_base 11: mod_base = OTHER; note = 2'-O-methyl ribonucleotide
  modified_base 12: mod_base = OTHER; note = 2'-fluoro ribonucleotide
  modified_base 13: mod_base = OTHER; note = 2'-O-methyl ribonucleotide
  modified_base 14: mod_base = OTHER; note = 2'-fluoro ribonucleotide
  modified_base 15: mod_base = OTHER; note = 2'-O-methyl ribonucleotide
  modified_base 16: mod_base = OTHER; note = 2'-fluoro ribonucleotide
  modified_base 17: mod_base = OTHER; note = 2'-O-methyl ribonucleotide
  modified_base 18: mod_base = OTHER; note = 2'-fluoro ribonucleotide
  modified_base 19: mod_base = OTHER; note = 2'-O-methyl ribonucleotide
  modified_base 20: mod_base = OTHER; note = 2'-fluoro ribonucleotide
  modified_base 21: mod_base = OTHER; note = 2'-O-methyl ribonucleotide
  modified_base 22: mod_base = OTHER; note = 2'-fluoro ribonucleotide
  modified_base 23: mod_base = OTHER; note = 2'-O-methyl ribonucleotide
  modified_base 1..3: mod_base = OTHER; note = phosphorothioate linkage
  modified_base 21..23: mod_base = OTHER; note = phosphorothioate linkage
tagtcactgcacgtaacacactg

SEQ ID NO: 348 - RNA, 21 nt, synthetic construct
  source 1..21: mol_type = other RNA
  modified_base 1: mod_base = OTHER; note = 2'-O methyl vinyl phosphonate uridine
  modified_base 2: mod_base = OTHER; note = 2'-fluoro ribonucleotide
  modified_base 3..13: mod_base = OTHER; note = 2'-O-methyl ribonucleotide
  modified_base 14: mod_base = OTHER; note = 2'-fluoro ribonucleotide
  modified_base 15..21: mod_base = OTHER; note = 2'-O-methyl ribonucleotide
  modified_base 1..3: mod_base = OTHER; note = phosphorothioate linkage
  modified_base 19..21: mod_base = OTHER; note = phosphorothioate linkage
ttcgctttcaccgcaaggatt

SEQ ID NO: 349 - RNA, 21 nt, synthetic construct
  source 1..21: mol_type = other RNA
  modified_base 1: mod_base = OTHER; note = 2'-O methyl vinyl phosphonate uridine
  modified_base 2: mod_base = OTHER; note = 2'-fluoro ribonucleotide
  modified_base 3..13: mod_base = OTHER; note = 2'-O-methyl ribonucleotide
  modified_base 14: mod_base = OTHER; note = 2'-fluoro ribonucleotide
  modified_base 15..21: mod_base = OTHER; note = 2'-O-methyl ribonucleotide
  modified_base 1..3: mod_base = OTHER; note = phosphorothioate linkage
  modified_base 19..21: mod_base = OTHER; note = phosphorothioate linkage
taggtctggtggatattactt

SEQ ID NO: 350 - RNA, 21 nt, synthetic construct
  source 1..21: mol_type = other RNA
  modified_base 1: mod_base = OTHER; note = 2'-O methyl vinyl phosphonate uridine
  modified_base 2: mod_base = OTHER; note = 2'-fluoro ribonucleotide
  modified_base 3..13: mod_base = OTHER; note = 2'-O-methyl ribonucleotide
  modified_base 14: mod_base = OTHER; note = 2'-fluoro ribonucleotide
  modified_base 15..21: mod_base = OTHER; note = 2'-O-methyl ribonucleotide
  modified_base 1..3: mod_base = OTHER; note = phosphorothioate linkage
  modified_base 19..21: mod_base = OTHER; note = phosphorothioate linkage
tgttcactatcacaaacaatt

SEQ ID NO: 351 - RNA, 21 nt, synthetic construct
  source 1..21: mol_type = other RNA
  modified_base 1: mod_base = OTHER; note = 2'-O methyl vinyl phosphonate uridine
  modified_base 2: mod_base = OTHER; note = 2'-fluoro ribonucleotide
  modified_base 3..13: mod_base = OTHER; note = 2'-O-methyl ribonucleotide
  modified_base 14: mod_base = OTHER; note = 2'-fluoro ribonucleotide
  modified_base 15..21: mod_base = OTHER; note = 2'-O-methyl ribonucleotide
  modified_base 1..3: mod_base = OTHER; note = phosphorothioate linkage
  modified_base 19..21: mod_base = OTHER; note = phosphorothioate linkage
tgatggacagttaagcagctt

SEQ ID NO: 352 - RNA, 19 nt, synthetic construct
  source 1..19: mol_type = other RNA
  modified_base 1..2: mod_base = OTHER; note = 2'-O-methyl ribonucleotide
  modified_base 3: mod_base = OTHER; note = 2'-fluoro ribonucleotide
  modified_base 4..6: mod_base = OTHER; note = 2'-O-methyl ribonucleotide
  modified_base 7..9: mod_base = OTHER; note = 2'-fluoro ribonucleotide
  modified_base 10..11: mod_base = OTHER; note = 2'-O-methyl ribonucleotide
  modified_base 12: mod_base = OTHER; note = 2'-fluoro ribonucleotide
  modified_base 13..16: mod_base = OTHER; note = 2'-O-methyl ribonucleotide
  modified_base 17: mod_base = OTHER; note = 2'-fluoro ribonucleotide
  modified_base 18..19: mod_base = OTHER; note = 2'-O-methyl ribonucleotide
  modified_base 1..3: mod_base = OTHER; note = phosphorothioate linkage
gagtcgcatctcagtgcaa

SEQ ID NO: 353 - RNA, 19 nt, synthetic construct
  source 1..19: mol_type = other RNA
  modified_base 1..2: mod_base = OTHER; note = 2'-O-methyl ribonucleotide
  modified_base 3: mod_base = OTHER; note = 2'-fluoro ribonucleotide
  modified_base 4..6: mod_base = OTHER; note = 2'-O-methyl ribonucleotide
  modified_base 7..9: mod_base = OTHER; note = 2'-fluoro ribonucleotide
  modified_base 10..11: mod_base = OTHER; note = 2'-O-methyl ribonucleotide
  modified_base 12: mod_base = OTHER; note = 2'-fluoro ribonucleotide
  modified_base 13..16: mod_base = OTHER; note = 2'-O-methyl ribonucleotide
  modified_base 17: mod_base = OTHER; note = 2'-fluoro ribonucleotide
  modified_base 18..19: mod_base = OTHER; note = 2'-O-methyl ribonucleotide
  modified_base 1..3: mod_base = OTHER; note = phosphorothioate linkage
gtcgcatctcagtgcagga

SEQ ID NO: 354 - RNA, 19 nt, synthetic construct
  source 1..19: mol_type = other RNA
  modified_base 1..2: mod_base = OTHER; note = 2'-O-methyl ribonucleotide
  modified_base 3: mod_base = OTHER; note = 2'-fluoro ribonucleotide
  modified_base 4..6: mod_base = OTHER; note = 2'-O-methyl ribonucleotide
  modified_base 7..9: mod_base = OTHER; note = 2'-fluoro ribonucleotide
  modified_base 10..11: mod_base = OTHER; note = 2'-O-methyl ribonucleotide
  modified_base 12: mod_base = OTHER; note = 2'-fluoro ribonucleotide
  modified_base 13..16: mod_base = OTHER; note = 2'-O-methyl ribonucleotide
  modified_base 17: mod_base = OTHER; note = 2'-fluoro ribonucleotide
  modified_base 18..19: mod_base = OTHER; note = 2'-O-methyl ribonucleotide
  modified_base 1..3: mod_base = OTHER; note = phosphorothioate linkage
agaacctctcacttcacca

SEQ ID NO: 355 - RNA, 19 nt, synthetic construct
  source 1..19: mol_type = other RNA
  modified_base 1..2: mod_base = OTHER; note = 2'-O-methyl ribonucleotide
  modified_base 3: mod_base = OTHER; note = 2'-fluoro ribonucleotide
  modified_base 4..6: mod_base = OTHER; note = 2'-O-methyl ribonucleotide
  modified_base 7..9: mod_base = OTHER; note = 2'-fluoro ribonucleotide
  modified_base 10..11: mod_base = OTHER; note = 2'-O-methyl ribonucleotide
  modified_base 12: mod_base = OTHER; note = 2'-fluoro ribonucleotide
  modified_base 13..16: mod_base = OTHER; note = 2'-O-methyl ribonucleotide
  modified_base 17: mod_base = OTHER; note = 2'-fluoro ribonucleotide
  modified_base 18..19: mod_base = OTHER; note = 2'-O-methyl ribonucleotide
  modified_base 1..3: mod_base = OTHER; note = phosphorothioate linkage
gcaggagactggctaaata

SEQ ID NO: 356 - RNA, 21 nt, synthetic construct
  source 1..21: mol_type = other RNA
  modified_base 1: mod_base = OTHER; note = 2'-O methyl vinyl phosphonate uridine
  modified_base 2: mod_base = OTHER; note = 2'-fluoro ribonucleotide
  modified_base 3..13: mod_base = OTHER; note = 2'-O-methyl ribonucleotide
  modified_base 14: mod_base = OTHER; note = 2'-fluoro ribonucleotide
  modified_base 15..21: mod_base = OTHER; note = 2'-O-methyl ribonucleotide
  modified_base 1..3: mod_base = OTHER; note = phosphorothioate linkage
  modified_base 19..21: mod_base = OTHER; note = phosphorothioate linkage
ttgcactgagatgcgactctt

SEQ ID NO: 357 - RNA, 21 nt, synthetic construct
  source 1..21: mol_type = other RNA
  modified_base 1: mod_base = OTHER; note = 2'-O methyl vinyl phosphonate uridine
  modified_base 2: mod_base = OTHER; note = 2'-fluoro ribonucleotide
  modified_base 3..13: mod_base = OTHER; note = 2'-O-methyl ribonucleotide
  modified_base 14: mod_base = OTHER; note = 2'-fluoro ribonucleotide
  modified_base 15..21: mod_base = OTHER; note = 2'-O-methyl ribonucleotide
  modified_base 1..3: mod_base = OTHER; note = phosphorothioate linkage
  modified_base 19..21: mod_base = OTHER; note = phosphorothioate linkage
tcctgcactgagatgcgactt

SEQ ID NO: 358 - RNA, 21 nt, synthetic construct
  source 1..21: mol_type = other RNA
  modified_base 1: mod_base = OTHER; note = 2'-O methyl vinyl phosphonate uridine
  modified_base 2: mod_base = OTHER; note = 2'-fluoro ribonucleotide
  modified_base 3..13: mod_base = OTHER; note = 2'-O-methyl ribonucleotide
  modified_base 14: mod_base = OTHER; note = 2'-fluoro ribonucleotide
  modified_base 15..21: mod_base = OTHER; note = 2'-O-methyl ribonucleotide
  modified_base 1..3: mod_base = OTHER; note = phosphorothioate linkage
  modified_base 19..21: mod_base = OTHER; note = phosphorothioate linkage
tggtgaagtgagaggttcttt

SEQ ID NO: 359 - RNA, 21 nt, synthetic construct
  source 1..21: mol_type = other RNA
  modified_base 1: mod_base = OTHER; note = 2'-O methyl vinyl phosphonate uridine
  modified_base 2: mod_base = OTHER; note = 2'-fluoro ribonucleotide
  modified_base 3..13: mod_base = OTHER; note = 2'-O-methyl ribonucleotide
  modified_base 14: mod_base = OTHER; note = 2'-fluoro ribonucleotide
  modified_base 15..21: mod_base = OTHER; note = 2'-O-methyl ribonucleotide
  modified_base 1..3: mod_base = OTHER; note = phosphorothioate linkage
  modified_base 19..21: mod_base = OTHER; note = phosphorothioate linkage
tatttagccagtctcctgctt

SEQ ID NO: 360 - protein, 90 aa, synthetic construct
  VARIANT 33: note = D, F, Y or H
  VARIANT 35: note = Y, G, A or V
  VARIANT 37: note = I, T, L, A or H
  VARIANT 39: note = S, Y or P
  VARIANT 40: note = Y, G, Q or R
  VARIANT 41: note = G or P
  VARIANT 42: note = A, Y, P, D or S
  VARIANT 47: note = any amino acid other than methionine or proline
  VARIANT 49: note = any amino acid other than methionine or proline
  VARIANT 69: note = W, N, S or E
  VARIANT 71: note = L, Y or G
  VARIANT 73: note = D, Q, H or V
  VARIANT 74: note = G or S
  VARIANT 79: note = R, G, F, L or D
  VARIANT 80: note = W, S, P or L
  VARIANT 82: note = T, V, M or S
  VARIANT 85: note = any amino acid other than methionine or proline
  VARIANT 87: note = any amino acid other than methionine or proline
MLPAPKNLVVSRVTEDSARLSWTAPDAAFDSFXIXYXEXXXXGEAIXLXVPGSERSYDLTGLKPGTEYXVXIXXVKGGXXSXPLXAXFTT

SEQ ID NO: 361 - protein, 90 aa, synthetic construct
MLPAPKNLVVSRVTEDSARLSWTAPDAAFDSFYIAYAEPRPDGEAIVLTVPGSERSYDLTGLKPGTEYSVLIHGVKGGLLSSPLSAIFTT

SEQ ID NO: 362 - protein, 90 aa, synthetic construct
MLPAPKNLVVSRVTEDSARLSWTAPDAAFDSFFIGYLEPQPPGEAIVLTVPGSERSYDLTGLKPGTEYNVTIQGVKGGFPSMPLSAIFTT

SEQ ID NO: 363 - protein, 90 aa, synthetic construct
MLPAPKNLVVSRVTEDSARLSWTAPDAAFDSFHIVYHEPRPSGEAIVLTVPGSERSYDLTGLKPGTEYEVGIVSVKGGDLSVPLSAIFTT

SEQ ID NO: 364 - protein, 90 aa, synthetic construct
MLPAPKNLVVSRVTEDSARLSWTAPDAAFDSFDIGYTEYGGYGEAIVLTVPGSERSYDLTGLKPGTEYWVLIQGVKGGGSSVPLSAIFTT

SEQ ID NO: 365 - protein, 90 aa, synthetic construct
MLPAPKNLVVSRVTEDSARLSWTAPDAAFDSFPITYIEAVVLGEAIVLTVPGSERSYDLTGLKPGTEYPVGISGVKGGHNSMPLSAIFTT

SEQ ID NO: 366 - protein, 90 aa, synthetic construct
MLPAPKNLVVSEVTEDSARLSWQGVARAFDSFMINYSELFWMGEAIVLTVPGSERSYDLTGLKPGTEYVVRIKGVKGGKGSWPLHAHFTT

SEQ ID NO: 367 - protein, 90 aa, synthetic construct
MLPAPKNLVVSRVTEDSARLSWTAPDAAFDSFNIEYAETRWYGEAIVLTVPGSERSYDLTGLKPGTEYVVPIDGVKGGIASKPLSAIFTT

SEQ ID NO: 368 - protein, 90 aa, synthetic construct
MLPAPKNLVVSEVTEDSARLSWQGVARAFDSFLITYRDQIFAGEVIVLTVPGSERSYDLTGLKPGTEYPVWIQGVKGGSPSAPLSAESTT

SEQ ID NO: 369 - protein, 90 aa, synthetic construct
MLPAPKNLVVSEVTEDSARLSWQGVARAFDSFLITYREQIFAGEVIVLTVPGSERSYDLTGLKPGTEYWVYIWGVKGGKPSFPLRAGFTT

SEQ ID NO: 370 - protein, 90 aa, synthetic construct
MLPAPKNLVVSRVTEDSARLSWTAPDAAFDSFPIIYMETFSRGEAIVLTVPGSERSYDLTGLKPGTEYRVPIGGVKGGSSSCPLSAIFTT

SEQ ID NO: 371 - protein, 90 aa, synthetic construct
MLPAPKNLVVSDVTEDSARLSWQGVARAFDSFLITYREQIFAGEVIVLTVPGSERSYDLTGLKPGTEYPVWIQGVKGGSPSAPLSAEFTT

SEQ ID NO: 372 - protein, 90 aa, synthetic construct
MLPAPKNLVVSRVTEDSARLSWTAPDAAFDSFKIAYIETATRGEAIVLTVPGSERSYDLTGLKPGTEYVVPIPGVKGGNTSSPLSAIFTT

SEQ ID NO: 373 - protein, 90 aa, synthetic construct
MLPAPKNLVVSRVTEDSARLSWTAPDAAFDSFFIPYAEPSPTGEAIVLTVPGSERSYDLTGLKPGTEYSVLIHGVKGGHLSDPLSAISTT

SEQ ID NO: 374 - protein, 90 aa, synthetic construct
MLPAPKNLVVSRVTEDSARLSWTAPDAAFDSFLIAYPEDGFRGEAIVLTVPGSERSYDLTGLKPGTEYPVPILGVKGGGGSGPLSAIFTT

SEQ ID NO: 375 - protein, 90 aa, synthetic construct
MLPAPKNLVVSRVTEDSARLSWTAPDAAFDSFPIYYVENVVWGEAIVLTVPGSERSYDLTGLKPGTEYWEVIIGVKGGQCSRPLSAIFTT

SEQ ID NO: 376 - protein, 90 aa, synthetic construct
MLPAPKNLVVSRVTEDSARLSWQGVARAFDSFLITYREQIFAGEVIVLTVPGSERSYDLTGLKPGTECPVWIQGVKGGSPSAPLSAEFTT

SEQ ID NO: 377 - protein, 89 aa, synthetic construct
MLPAPKNLVVSRVTEDSARLSWTAPDAAFDSFGIAYREFRPSGEAIVLTVPGSERSYDLTVETGYRNEVVICGVKGGPWSGPLSAIFTT

SEQ ID NO: 378 - protein, 90 aa, synthetic construct
MLPAPKNLVVSRVTEDSARLSWTAPDAAFDSFPILYTECVYRGEAIVLTVPGSERSYDLTGLKPGTEYHVPITGVKGGGGSWPLSAIFTT

SEQ ID NO: 379 - protein, 90 aa, synthetic construct
MLPAPKNLVVSRVTEDSARLSWTAPDAAFDSFNIMYHEIIYVGEAIVLTVPGSERSYDLTGLKPGTEYPVPIEGVKGGGTSGPLSAIFTT

SEQ ID NO: 380 - protein, 90 aa, synthetic construct
MLPAPKNLVVSRVTEDSARLSWTAPDAAFDSFAITYTEAALCGEAIVLTVPGSERSYDLTGLKPGTEYPVPINGVKGGGTSGPLSAIFTT

SEQ ID NO: 381 - protein, 90 aa, synthetic construct
MLPAPKNLVVARVTEDSARLSWTAPDAAIDSFPIDYSEYWWGGEAIVLTVPGSERSYDLTGLKPGTEYPVLITGVKGGYRSGPLSAIFTT

SEQ ID NO: 382 - protein, 90 aa, synthetic construct
MLPAPKNLVVSRVTEDSARLSWTAPDAAFDSFSIRYNEFIVAGEAIVLTVPGSERSYDLTGLKPGTEYDVPIAGVKGGGASWPLSAIVTT

SEQ ID NO: 383 - protein, 88 aa, synthetic construct
MLPAPKNLVVSRVTEDSARLSWTAPDAAFDSFWYLELQFAGEAIVLTVPGSERSYDLTGLKPGTEYNVPITGVKGGIISFPLSAIFTT

SEQ ID NO: 384 - protein, 90 aa, synthetic construct
MLPAPKNLVVSRVTEDSARLSWTAPDAAFDSFAIWYHEWYGDGEAIVLTVPGSERSYDLTGPKPGTEYRVRISGVKGGFESGPLSAIFTT

SEQ ID NO: 385 - protein, 90 aa, synthetic construct
MLPAPKNLVVSRVTEDSARLSWTAPDAAFDSFMIRYQEGTRWGEAIVLTVPGSERSYDLTGLKPGTEYIVMIAGVKGGQISLPLSAIFTT

SEQ ID NO: 386 - protein, 90 aa, synthetic construct
MLPAPKNLVVSRVTEDSARLSWTAPDAAFDSFPIWYLEKSYQGEAIVLTVPGSERSYDLTGLKPGTEYVVPIIGVKGGRDSCPLSAIFTT

SEQ ID NO: 387 - protein, 90 aa, synthetic construct
MLPAPKNLVVSEVTEDSARLSWQGVARAFDSFLITYREQIFAGEVIVLTVPGSERSYDLTGLKPGTEYPVWIQGVKGGSPSAPLSAEFTT

SEQ ID NO: 388 - protein, 89 aa, synthetic construct
MLPAPKNLVVSRVTEDSARLSWTAPDAAFDSFRISYAETVRQGEAIVLTVPGSERSYDLTVETGYRNWVMILGVKGGPGSLPLSAIFTT

SEQ ID NO: 389 - protein, 90 aa, synthetic construct
MLPAPKNLVVSEVTEDSARLSWQGVVRAFDSFLITYREQIFAGEVIVLTVPGSERSYDLTGLKPGTEYPVWIQGVKGGSPSAPLSAEFTT

SEQ ID NO: 390 - protein, 90 aa, synthetic construct
MLPAPKNLVVSRVTEDSARLSWTAPDAAFDSFWIEYWEAVGFGEAIVLTVPGSERSYDLTGLKPGTEYFVGIYGVKGGYLSAPLSAIFTT

SEQ ID NO: 391 - protein, 90 aa, synthetic construct
MLPAPKNLVVSRVTEDSARLSWTAPDAAFDSFIIHYVEQQLIGEAIVLTVPGSERSYDLTGLKPGTEYPVPITGVKGGACSWPLSAIFTT

SEQ ID NO: 392 - protein, 90 aa, synthetic construct
MLPAPKNLVVSRVTEDSARLSWTAPDAAFDSFTIEYSEHPIDGEAIPLFVPGSERSYDLTGLKPGTEYYVRIHGVKGGWFSHPLWAFFTT

SEQ ID NO: 393 - protein, 90 aa, synthetic construct
MLPAPKNLVVSRVTEDSARLSWQGVARAFDSFLITYREQIFAGEVIVLTVPGSERSYDLTGLKPGTEYGVTIAGVKGGWRSKPLNAESTT

SEQ ID NO: 394 - protein, 90 aa, synthetic construct
MLPAPKNLVVSRVTEDSARLSWTAPDAAFDSFGIAYVESYWYGEAIVLTVPGSERSYDLTGLKPGTEYNVPIYGVKGGDGSGPLSAIFTT

SEQ ID NO: 395 - protein, 90 aa, synthetic construct
MLPAPKNLVVSRVTEDSARLSWTAPDAAFDSFYITYVELNLAGEAIVLTVPGSERSYDLTGLKPGTEYPVPILGVKGGSLSQPLSAIFTT

SEQ ID NO: 396 - protein, 90 aa, synthetic construct
MLPAPKNLVVSRVTEDSARLSWTAPDAAFDSFPISYIESIADGEAIVLTVPGSERSYDLTGLKPGTEYWVAIVGVKGGPFSWSLSAIVTT

SEQ ID NO: 397 - protein, 90 aa, synthetic construct
MLPAPKNLVVSEVTEDSARLSWQGVARAFDSFLITYREQIFAGEVIVPTVPGSERSYDLTGLKPGTEYPVPIAGVKGGGPSAPLSAIFTT

SEQ ID NO: 398 - protein, 90 aa, synthetic construct
MLPAPKNLVVSRVTEDSARLSWTTPDAAFDSFPIYYWEVTITGEAIYLSVPGSERSYDLTGLKPGTEYPVDIPGVKGGAASPPLSAIFTT

SEQ ID NO: 399 - protein, 90 aa, synthetic construct
MLPAPKNLVVSRVTEDSARLSWTAPDAAFDSFPILYLEHTVRSEAIVLTVPGSERSYDLTDLKPGTEYCVPIDGVKGGLRSRPLSAIFTT

SEQ ID NO: 400 - protein, 90 aa, synthetic construct
MLPAPKNLVVSRVTEDSARLSWTAPDAAFDSFPIPYTEPPDPGEAIVLTVPGSERSYDLTGLKPGTEYLVTILGVKGGSMSVPLSAIFTT

SEQ ID NO: 401 - protein, 90 aa, synthetic construct
MLPAPKNLVVSRVTEDSARLSWTAPDAAFDSFTIDYWENRCPGEAIVLTVPGSERSYDLTGLKPGTEYCVWISGVKGGYSSWPLSAIFTT

SEQ ID NO: 402 - protein, 90 aa, synthetic construct
MLPAPKNLVVSRVTEDSARLSWQGVARAFDSFLITYREQIFAGEVIVLTVPGSERSYDLTGLKPGTEYPVWIQGVKGGHLSDPLSAIVTT

SEQ ID NO: 403 - protein, 90 aa, synthetic construct
MLPAPKNLVVSRVTEDSARLSWTAPDAAFDSFLIPYAETSPSGEAIVLTVPGSERSYDLTGLKPGTEYSVLIHGVKGGDYSEPLSAIFTT

SEQ ID NO: 404 - protein, 90 aa, synthetic construct
MLPAPKNLVVSRVTEDSARLSWTAPDAAFDSFMIVYYEYTRFGEAIVLTVPGSERSYDLTGLKPGTEYTVPIDGVKGGGRSSPLSAIFTT

SEQ ID NO: 405 - protein, 90 aa, synthetic construct
MLPAPKNLVVSRVTEDSARLSWTAPDAAFDSFFIPYAEPSPTGEAIVLTVPGSERSYDLTGLKPGTEYSVLIHGVKGGHLSDPLSAIVTT

SEQ ID NO: 406 - protein, 90 aa, synthetic construct; identical to SEQ ID NO: 387

SEQ ID NO: 407 - protein, 90 aa, synthetic construct
MLPAPKNLVVSRVTEDSARLSWTAPDAAFDSFIIPYAEVRPDGEAIVLTVPGSERSYDLTGLKPGTEYSVLIHGVKGGKLSLPLSAIFTT

SEQ ID NO: 408 - protein, 90 aa, synthetic construct
MLPAPKNLVVSRVTEDSARLSWTAPDAAFDSFGIVYLEMMVTGEAIVLTVPGSERSYDLTGLKPGTEYDVPILGVKGGTRSVPLSAIFTT

SEQ ID NO: 409 - protein, 94 aa, synthetic construct
MLPAPKNLVVSRVTEDSARLSWTAPDAAFDSFLIYYEEGYLEYYYSGEAIVLTVPGSERSYDLTGLKPGTEYYVGIVGVKGGGLSGPLSAISTT

SEQ ID NO: 410 - protein, 90 aa, synthetic construct
MLPAPKNLVVSRVTEDSARLSWTAPDAAFDSFPIAYAEPRPDGEAIVLTVPGSERSYDLTGLKPGTEYSVLIHGVKGGDWSLPLSAIFTT

SEQ ID NO: 411 - protein, 91 aa, synthetic construct
MSLPAPKNLVVSRVTEDSARLSWTAPDAAFDSFTIHYREFQLSGEAIVLTVPGSERSYDLTGLKPGTEYDVPIEGVKGGPGSRPLSAIFTT

SEQ ID NO: 412 - protein, 90 aa, synthetic construct
MLPAPKNLVVSEVTEDSARLSWQGVARAFDSFLITYREQIFAGEVIVLTVPGSECSYDLTGLKPGTEYPVWIQGVKGGSPSAPLSAEFTT

SEQ ID NO: 413 - protein, 90 aa, synthetic construct
MLPAPKNLVVSRVTEDSARLSWTAPDAAFDSFEIDYDELAIYGEAIVLTVPGSERSYDLTGLKPGTEYGVRIPGVKGGMPSLPLSAIVTT

SEQ ID NO: 414 - protein, 90 aa, synthetic construct
MLPAPENLVVSEVTEDSARLSWQGVARAFDSFLITYREQIFAGEVIVLTVPGSERSYDLTGLKPGTEYPVWIQGVKGGSPSAPLSAESTT

SEQ ID NO: 415 - protein, 90 aa, synthetic construct
MLPAPKNLVVSRVTEDSARLSWTAPDAAFDSFAIAYGEHIVIGEAIVLTVPGSERSYDLTGLKPGTEYMVPIAGVKGGPISLPLSAIFTT

SEQ ID NO: 416 - protein, 90 aa, synthetic construct
MLPAPKNLVVSRVTEDSARLSWTAPDAAFDSFFIPYAEPSPTGEAIVLTVPGSERSYDLTGLKPGTEYSVLIHGVKGGHLSDPLSAIFTT

SEQ ID NO: 417 - protein, 90 aa, synthetic construct
MLPAPKNLVVSRVTEDSARLSWTAPDAAFDSFSIGYVELVLLGEAIVLTVPGSERSYDLTGLKPGTEYDVLIPGVKGGSLSRPLSAIFTT

SEQ ID NO: 418 - protein, 90 aa, synthetic construct
MLPAPKNLVVSRVTEDSARLSWTAPDAAFDSFAIPYAELSRNGEAIVLTVPGSERSYDLTGLKPGTEYTVLIHGVKGGCLSDPLSAIFTT

SEQ ID NO: 419 - protein, 90 aa, synthetic construct
MLPAPKNLVVSRVTEDSARLSWTAPDAAFDSFHIEYLELSRHGEAIVLTVPGSERSYDLTGLKPGTEYWVMIFGVKGGGPSKPLSAIFTT

SEQ ID NO: 420 - protein, 88 aa, synthetic construct
MLPAPKNLVVSRVTEDSARLSWTAPDAAFDSFVYNEVHWIGEAIVLTVPGSERSYDLTGLKPGTEYFVGIYGVKGGHWSKPLSAIFTT

SEQ ID NO: 421 - protein, 90 aa, synthetic construct; identical to SEQ ID NO: 413

SEQ ID NO: 422 - protein, 90 aa, synthetic construct
MLPAPKNLVVSRVTEDSARLSWTAPDAAFDSFQIVYSELWIKGEAIVLTVPGSERSYDLTGLKPGTEYQVPIPGVKGGRNSFPLSAIFTT

SEQ ID NO: 423 - protein, 90 aa, synthetic construct
MLPAPKNLVVSRVTEDSARLSWTAPDAAFDSFKIRYTETRSIGEAIVLTVPGSERSYDLTGLKPGTEYCVPIGGVKGGDSSWPLSAISTT

SEQ ID NO: 424 - protein, 90 aa, synthetic construct
MLPAPKNLVVSRVTEDSARLSWTAPDAAFDSFCISYYERMGRGEAIVLTVPGSERSYDLTGLKPGTEYMVYIFGVKGGLNSLPLSAIFTT

SEQ ID NO: 425 - protein, 90 aa, synthetic construct
MLPAPKNLVVSRVTEDSARLSWTAPDAAFDSFYIVYAEPIPNGEAIVLTVPGSERSYDLTGLKPGTEYSVLIHGVKGGRNSDPLSAIFTT

SEQ ID NO: 426 - protein, 90 aa, synthetic construct
MLPAPKNLVVSRVTKDSARLSWTAPDAAFDSFPIAYAEPRPDGEAIVLTVPGSERSYDLTGLKPGTEYSVLIHGVKGGLLSSPLSAIFTT

SEQ ID NO: 427 - protein, 90 aa, synthetic construct
MLPAPKNLVVSRVTEDSARLSWTAPDAAFDSFTIDYDEPRSPGEAIVLTVPGSERSYDLTGLKPGTEYRVFIWGIKGGDTSFPLSAIFTT

SEQ ID NO: 428 - protein, 88 aa, synthetic construct
MLPAPKNLVVSRVTEDSARLSWTAPDAAFDSFTILYAEQAQFGEAIVLTVPGSERSYDLTGLKPGTEYPITGVKGGTRSGPLSAISTT

SEQ ID NO: 429 - protein, 90 aa, synthetic construct
MLPAPKNLVVSRVTEDSARLSWTAPDAAFDSFIIPYAEVRPDGEAIVLTVPGSERSYDLTGLKPGTEYSVLIHGVKGGHLSDPLSAISTT

SEQ ID NO: 430 - protein, 90 aa, synthetic construct
MLPAPKNLVVSRVTEDSARLSWTAPDAAFDSFHIAYEETATSGEAIYLRVPGSERSYDLTGLKPGTEYGVEIEGVKGGARSRPLYADFTT

SEQ ID NO: 431 - protein, 90 aa, synthetic construct
MLPAPKNLVVSRVTEDSARLSWQGVARAFDSFLITYREQIFAGEVIVLTVPGSERSYDLTGLKPGTEYPVWIQGVKGGDLSNPLSAIFTT

SEQ ID NO: 432 - protein, 90 aa, synthetic construct
MLPAPKNLVVSRVTEDSARLSWTAPDAAFDSFPISYLELSLYGEAIVLTVPGSERSYDLTGLKPGTEYPVGIAGVKGGVVSRPLSAIFTT

SEQ ID NO: 433 - protein, 90 aa, synthetic construct
MLPAPKNLVVSRVTEDSARLSWTAPDAAFDSFTIGYREWYWYGEAIVLTVPGSERSYDLTGLKPGTEYNVPISGVKGGLDSFPLSAIFTT

SEQ ID NO: 434 - protein, 90 aa, synthetic construct
MLPAPKNLVVSEVTEDSARLSWQGVARAFDSFLITYREQIFAGEVIVLTVPGSERSYDLTGLKPGTEYPVWIQGVKGGSPSAPLSAESTT

SEQ ID NO: 435 - protein, 90 aa, synthetic construct
MLPAPKNLVVSRVTEDSARLSWTAPDAAFDSFSITYLEWWNLGEAIVLTVPGSERSYDLTGLKPGTEYMVTIPGVKGGMSSYPLSAIFTT

SEQ ID NO: 436 - protein, 90 aa, synthetic construct
MLPAPKNLVVSRVTEDSARLSWTAPDAAFDSFTISYGEEALIGEAIYLRVPGSERSYDLTGLKPGTEYYVHIEGVKGGSWSQPLAAAFTT

SEQ ID NO: 437 - protein, 90 aa, synthetic construct
MLPAPKNLVVSRVTEDSARLSWTAPDAAFDSFTIEYYENIGIGEAIVLTVPGSERSYDLTGLKPGTEYSVPIVGVKGGPYSHPLSAIFTT

SEQ ID NO: 438 - protein, 90 aa, synthetic construct
MLPAPKNLVVSRVTEDSARLSWTAPDAAFDSFPIAYAEPRPDGEAIVLTVPGSERSYDLTGLKPGTEYSVLIHGVKGGLLSSPLSAIFTT

SEQ ID NO: 439 - protein, 90 aa, synthetic construct
MLPAPKNLVVSRVTEDSARLSWTAPDAAFDSFGIGYYEHKRFGEAIQLSVPGSERSYDLTGLKPGTEYEVDIEGVKGGVLSWPLFAEFTT

SEQ ID NO: 440 - protein, 90 aa, synthetic construct
MLPAPKNLVVSRVTEDSARLSWTAPDAAFDSFVIEYTERFWSGEAIVLTVPGSERSYDLTGLKPGTEYSVPIDGVKGGQCSTPLSAIFTT

SEQ ID NO: 441 - protein, 90 aa, synthetic construct
MLPAPKNLVVSRVTEDSARLSWTAPDAAFDSFWIDYEEEGVIGEAIYLHVPGSERSYDLTGLKPGTEYVVKIHGVKGGHPSHPLVAVFTT

SEQ ID NO: 442 - protein, 90 aa, synthetic construct
MLPAPKNLVVSRVTEDSARLSWQGVARAFDSFLITYVELRHLGEAIVLTVPGSERSYDLTGLKPGTEYPVWIQGVKGGSPSAPLSAEFTT

SEQ ID NO: 443 - protein, 90 aa, synthetic construct
MLPAPKNLVVSRVTEDSARLSWTAPDAAFDSFLIPYAETSPSGEAIVLTVPGSERSYDLTGLKPGTEYSVLIHGVKGGDYSSPLSAIFTT

SEQ ID NO: 444 - protein, 90 aa, synthetic construct
MLPAPKNLVVSRVTEDSARLSWTAPDAAFDSFPIAYAEPRPDGEAIVLTVPGSERSYDLTGLKPGTEYSVLIHGVKGGLLSSPLSAISTT

SEQ ID NO: 445 - protein, 90 aa, synthetic construct
MLPAPKNLVVSRVTEDSARLSWQGVARAFDSFSILYLELTPKGEAIVLTVPGSERSYDLTGLKPGTEYPVWIQGVKGGSPSAPLSAEFTT

SEQ ID NO: 446 - protein, 90 aa, synthetic construct
MLPAPKNLVVSRVTEDSARLSWTAPDAAFDSFIIEYFEPIPIGEAIVLTVPGSERSYDLTGLKPGTEYAVNIYGVKGGYLSHPLSAIFTT

SEQ ID NO: 447 - protein, 90 aa, synthetic construct; identical to SEQ ID NO: 412

SEQ ID NO: 448 - protein, 90 aa, synthetic construct
MLPAPKNLVVSRVTEDSARLSWTAPDAAFDSFAIEYTEFLYSGEAIVLTVPGSERSYDLTGLKPGTEYGVPINGVKGGFVSPPLSAIVTT

SEQ ID NO: 449 - protein, 90 aa, synthetic construct
MLPAPKNLVVSRVTEDSARLSWTAPDAAFDSFPIKYREVLRCGEAIVLTVPGSERSYDLTGLKPGTEYTVPITGVKGGFGSSPLSAIFTT

SEQ ID NO: 450 - protein, 90 aa, synthetic construct
MLPAPENLVVSRVTEDSARLSWTAPDAAFDSFWIEYYEGVIQGEAIVLTVPGSERSYDLTGLKPGTEYFVAIWGVKGGKWSVPLSAIFTT

SEQ ID NO: 451 - protein, 86 aa, synthetic construct
MLPAPKNLVVSRVTEDSARLSWQGVARAFDSFLITYREQIFAGEVIVLTVPGSERSYDLTGLKPGTEYPVWIQGVKGGSPSAEFTT

SEQ ID NO: 452 - protein, 90 aa, synthetic construct
MLPAPKNLVVSRVTEDSARLSWTAPDAAFDSFQIHYWETQGFGEAIVLTVPGSERSYDLTGLKPGTEYPVLIPGVKGGPSSLPLSAIFTT

SEQ ID NO: 453 - protein, 90 aa, synthetic construct; identical to SEQ ID NO: 416

SEQ ID NO: 454 - protein, 90 aa, synthetic construct
MLPAPKNLVVSRVTEDSARLSWTAPDAAFDSFAIEYYEPVPAGEAIYLDVPGSERSYDLTGLKPGTEYDVTIYGVKGGYYSHPLFASFTT

SEQ ID NO: 455 - protein, 90 aa, synthetic construct
MLPAPKNLVVSEVTEDSARLSWQGVARAFDSFLITYREQIFAGEVIVLTVPGSERSYDLTGLKPGTEYPVWIQGVKGGSPSAPLSAIFTT

SEQ ID NO: 456 - protein, 90 aa, synthetic construct; identical to SEQ ID NO: 387

SEQ ID NO: 457 - protein, 91 aa, synthetic construct
MSLPAPKNLVVSRVTEDSARLSWTAPDAAFDSFPIAYLEVFYEGEAIVLTVPGSERSYDLTGLKPGTEYQVPIEGVKGGAMSLPLSAIFTT

SEQ ID NO: 458 - protein, 90 aa, synthetic construct
MLPAPKNLVVSRVTEDSARLSWTAPDAAFDSFHIWYEEETTIGEAIYLHVPGSERSYDLTGLKPGTEYEVHITGVKGGPYSRPLFANFTT

SEQ ID NO: 459 - protein, 90 aa, synthetic construct
MLPAPKNLVVSRVTEDSARLSWTAPDAAFDSFGIAYDEWPEFGEAIVLTVPGSERSYDLTGLKPDTEYIVEIYGVKGGWFSWPLSAIFTT

SEQ ID NO: 460 - protein, 90 aa, synthetic construct
MLPAPKNLVVSRVTEDSARLSWTAPDAAFDSFFIPYAEPSPTGEAIVLTVPGSERSYDLTGLKPGTEYSVLIHGVKGGHLSDPLSVIFTT

SEQ ID NO: 461 - protein, 90 aa, synthetic construct
MLPAPKNLVVSRVTEDSARLSWTAPDAAFDSFYIWYEEVMYLGEAIVLTVPGSERSYDLTGLKPGTEYNVPIPGVKGGHSSPPLSAIFTT

SEQ ID NO: 462 - protein, 90 aa, synthetic construct
MLPAPKNLVVSRVTEDSARLSWTAPDAAFDSFHILYEELFLVGEAIVLTVPGSERSYDLTGLKPGTEYKVPISGVKGGPVSRPLSAIFTT

SEQ ID NO: 463 - protein, 90 aa, synthetic construct
MLPAPKNLVVSRVTEDSARLSWQGVARAFDSFLITYREQIFAGEVIVLTVPGSERSYDLTGLKPGTEYPVWIQGVKGGSPSAPLSAEFTT

SEQ ID NO: 464 - protein, 90 aa, synthetic construct
MLPAPKNLVVSRVTEDSARLSWTAPDAAFDSFHIVYHEPRPSGEAIWLHVPGSERSYDLTGLKPGTEYEVGIVSVKGGDLSVPLVAFFTT

SEQ ID NO: 465 - protein, 90 aa, synthetic construct
MLPAPKNLVVSRVTEDSARLSWTAPDAAFDSFYIAYAEPRPDGEAISLLVPGSERSYDLTGLKPGTEYSVLIHGVKGGLLSSPLYAVFTT

SEQ ID NO: 466 - protein, 90 aa, synthetic construct
MLPAPKNLVVSRVTEDSARLSWTAPDAAFDSFYIAYAEPRPDGEAIFLVVPGSERSYDLTGLKPGTEYSVLIHGVKGGLLSSPLHANFTT

SEQ ID NO: 467 - protein, 90 aa, synthetic construct
MLPAPKNLVVSRVTEDSARLSWTAPDAAFDSFYIAYAEPRPDGEAILLDVPGSERSYDLTGLKPGTEYSVLIHGVKGGLLSSPLYASFTT

SEQ ID NO: 468 - protein, 91 aa, synthetic construct
MSLPAPKNLVVSRVTEDSARLSWTAPDAAFDSFYIAYAEPRPDGEAISLYVPGSERSYDLTGLKPGTEYSVLIHGVKGGLLSSPLSAISTT

SEQ ID NO: 469 - protein, 90 aa, synthetic construct
MLPAPKNLVVSRVTEDSARLSWTAPDAAFDSFFIGYLEPQPPGEAIQLRVPGSERSYDLTGLKPGTEYNVTIQGVKGGFPSMPLSAIFTT

SEQ ID NO: 470 - protein, 90 aa, synthetic construct
MLPAPKNLVVSRVTEDSARLSWTAPDAAFDSFHISYEEDYTFGEAIYLRVPGSERSYDLTGLKPGTEYRVVIGGVKGGWFSEPLLAAFTT

SEQ ID NO: 471 - protein, 90 aa, synthetic construct
MLPAPKNLVVSRVTEDSARLSWTAPDAAFDSFFIGYLEPQPPGEAIYLTVPGSERSYDLTGLKPGTEYNVTIQGVKGGFPSYPLDASFTT

SEQ ID NO: 472 - protein, 93 aa, synthetic construct
MLPAPKNLVVSRVTEDSARLSWTAPDAAFDSFFIGYLEPQPPGEAIDLGVPGSERSYDLTGLKPGTEYNVTIQGVKGGFPSMPLDPLEAYFTT

SEQ ID NO: 473 - protein, 90 aa, synthetic construct
MLPAPKNLVVSRVTEDSARLSWTAPDAAFDSFYIAYAEPRPDGEAILLLVPGSERSYDLTGLKPGTEYSVLIHGVKGGLLSSPLSAIFTT

SEQ ID NO: 474 - protein, 90 aa, synthetic construct
MLPAPKNLVVSRVTEDSARLSWTAPDAAFDSFYIAYAEPRPDGEAINLQVPGSERSYDLTGLKPGTEYSVLIHGVKGGLLSSPLVAFFTT

SEQ ID NO: 475 - protein, 90 aa, synthetic construct
MLPAPKNLVVSRVTEDSARLSWTTPDAAFDSFFIGYLEPQPPGEAISLQVPGSERSYDLTGLKPGTEYNVTIQGVKGGFPSSPLFAVFTT

SEQ ID NO: 476 - protein, 87 aa, synthetic construct
MLPAPKNLVVSRVTEDSARLSWTAPDAAFDSFYIAYAEPRPDGEAIELHVPGSERSYDLTGLKPGTEYSVLIHGVKGGLLSSPLFTT

SEQ ID NO: 477 - protein, 90 aa, synthetic construct
MLPAPKNLVVSRVTEDSARLSWTAPDAAFDSFYIAYAEPRPDGEAIQLVVPGSERSYDLTGLKPGTEYSVLIHGVKGGLLSSPLSAIFTT

SEQ ID NO: 478 - protein, 90 aa, synthetic construct
MLPAPKNLVVSRVTEDSARLSWTAPDAAFDSFYIAYAEPRPDGEAITLDVPGSERSYDLTGLKPGTEYSVLIHGVKGGLLSSPLSAIFTT

SEQ ID NO: 479 - protein, 90 aa, synthetic construct
MLPAPKNLVVSRVTEDSARLSWTAPDAAFDSFYIAYAEPRPDGEAIWLVVPGSERSYDLTGLKPGTEYSVLIHGVKGGLLSSPLVASFTT

SEQ ID NO: 480 - protein, 90 aa, synthetic construct
MLPAPKNLVVSRVTEDSARLSWTAPDAAFDSFYIAYAEPRPDGEAINLDVPGSERSYDLTGLKPGTEYSVLIHGVKGGLLSSPLVAEFTT

SEQ ID NO: 481 - protein, 90 aa, synthetic construct
MLPAPKNLVVSRVTEDSARLSWTAPDAAFDSFYIAYAEPRPDGEAIHLSVPGSERSYDLTGLKPGTEYSVLIHGVKGGLLSSPLVAIFTT

SEQ ID NO: 482 - protein, 90 aa, synthetic construct
MLPAPKNLVVSRVTEDSARLSWTAPDAAFDSFFIGYLEPQPPGEAIALWVPGSERSYDLTGLKPGTEYNVTIQGVKGGFPSMPLSAIFTT

SEQ ID NO: 483 - protein, 90 aa, synthetic construct
MLPAPKNLVVSRVTEDSARLSWTAPDAAFDSFYIAYAEPRPDGEAIILVVPGSERSYDLTGLKPGTEYSVLIHGVKGGLLSSPLSAHFTT

SEQ ID NO: 484 - protein, 90 aa, synthetic construct
MLPAPKNLVVSRVTEDSARLSWTAPDAAFDSFFIGYLEPQPPGEAIQLWVPGSERSYDLTGLKPGTEYNVTIQGVKGGFPSHPLGAVFTT

SEQ ID NO: 485 - protein, 90 aa, synthetic construct
MLPAPKNLVVSRVTEDSARLSWTAPDAAFDSFYIAYAEPRPDGEAIQLHVPGSERSYDLTGLKPGTEYSVLIHGVKGGLLSSPLLASFTT

SEQ ID NO: 486 - protein, 90 aa, synthetic construct
MLPAPKNLVVSRVTEDSARLSWTAPDAAFDSFYIAYAEPRPDGEAIALHVPGSERSYDLTGLKPGTEYSVLIHGVKGGLLSSPLVAFFTT

SEQ ID NO: 487 - protein, 90 aa, synthetic construct
MLPAPKNLVVSRVTEDSARLSWTAPDAAFDSFFIGYLEPQPPGEAIHLHVPGSERSYDLTGLKPGTEYNVTIQGVKGGFPSIPLHANFTT

SEQ ID NO: 488 - protein, 90 aa, synthetic construct
MLPAPKNLVVSRVTEDSARLSWTAPDAAFDSFYIAYAEPRPDGEAIFLGVPGSERSYDLTGLKPGTEYSVLIHGVKGGLLSSPLSAIFTT

SEQ ID NO: 489 - protein, 90 aa, synthetic construct
MLPAPKNLVVSRVTEDSARLSWTAPDAAFDSFYIAYAEPRPDGEAIVLRVPGSERSYDLTGLKPGTEYSVLIHGVKGGLLSSPLIASFTT

SEQ ID NO: 490 - protein, 90 aa, synthetic construct
MLPAPKNLVVSRVTEDSARLSWTAPDAAFDSFYIAYAEPRPDGEAINLWVPGSERSYDLTGLKPGTEYSVLIHGVKGGLLSSPLDASFTT

SEQ ID NO: 491 - protein, 90 aa, synthetic construct
MLPAPKNLVVSRVTEDSARLSWTAPDAAFDSFVIEYFEWTLNGEAIVLTVPGSERSYDLTGLKPGTEYSVQIYGVKGGCLSRPLSAIFTT

SEQ ID NO: 492 - protein, 90 aa, synthetic construct
MLPAPKNLVVSRVTEDSARLSWTAPDAAFDSFYIAYAEPRPDGEAIHLWVPGSERSYDLTGLKPGTEYSVLIHGVKGGLLSSPLIAHFTT

SEQ ID NO: 493 - protein, 90 aa, synthetic construct
MLPAPKNLVVSRVTEDSARLSWTAPDAAFDSFFIPYAEPSPTGEAIVLTVPGSERSYDLTGLKPGTEYSVLIHGVKGGLLSSPLSAHFTT

SEQ ID NO: 494 - protein, 90 aa, synthetic construct
MLPAPKNLVVSRVTEDSARLSWTAPDAAFDSFYIAYAEPRPDGEAIYLYVPGSERSYDLTGLKPGTEYSVLIHGVKGGLLSSPLDAFFTT

SEQ ID NO: 495 - protein, 90 aa, synthetic construct
MLPAPKNLVVSRVTEDSARLSWTAPDAAFDSFYIAYAEPRPDGEAIGLQVPGSERSYDLTGLKPGTEYSVLIHGVKGGLLSSPLSAIFTT

SEQ ID NO: 496 - protein, 90 aa, synthetic construct
MLPAPKNLVVSRVTEDSARLSWTAPDAAFDSFYIAYAEPRPDGEAIQLAVPGSERSYDLTGLKPGTEYSVLIHGVKGGLLSSPLHAFFTT

SEQ ID NO: 497 - protein, 90 aa, synthetic construct
MLPAPKNLVVSRVTEDSARLSWTAPDAAFDSFFIGYLEPQPPGEAIWLHVPGSERSYDLTGLKPGTEYNVTIQGVKGGFPSIPLIAIFTT

SEQ ID NO: 498 - protein, 90 aa, synthetic construct
MLPAPKNLVVSRVTEDSARLSWTAPDAAFDSFYIAYAEPRPDGEAIVLDVPGSERSYDLTGLKPGTEYSVLIHGVKGGLLSSPLVAEFTT

SEQ ID NO: 499 - protein, 90 aa, synthetic construct
MLPTPKNLVVSRVTEDSARLSWTAPDAAFDSFYIAYAEPRPDGEAIQLRVPGSERSYDLTGLKPGTEYSVLIHGVKGGLLSSPLHASFTT

SEQ ID NO: 500 - protein, 90 aa, synthetic construct
MLPAPKNLVVSRVTEDSARLSWTAPDAAFDSFFIGYLEPQPPGEAIQLGVPGSERSYDLTGLKPGTEYNVTIQGVKGGFPSHPLNANFTT

SEQ ID NO: 501 - protein, 90 aa, synthetic construct
MLPAPKNLVVSRVTEDSARLSWTAPDAAFDSFFIGYLEPQPPGEAIQLEVPGSERSYDLTGLKPGTEYNVTIQGVKGGFPSMPLSAIFTT

SEQ ID NO: 502 - protein, 90 aa, synthetic construct
MLPAPKNLVVSRVTEDSARLSWTAPDAAFDSFYIAYAEPRPDGEAIFLGVPGSERSYDLTGLKPGTEYSVLIHGVKGGLLSSPLIAFFTT

SEQ ID NO: 503 - protein, 90 aa, synthetic construct
MLPAPKNLVVSRVTEDSARLSWTAPDAAFDSFFIGYLEPQPPGEAIGLQVPGSERSYDLTGLKPGTEYNVTIQGVKGGFPSHPLKAQFTT

SEQ ID NO: 504 - protein, 90 aa, synthetic construct
MLPAPKNLVVSRVTEDSARLSWTAPDAAFDSFYIAYAEPRPDGEAILLFVPGSERSYDLTGLKPGTEYSVLIHGVKGGLLSSPLVAHFTT

SEQ ID NO: 505 - protein, 90 aa, synthetic construct
MLPAPKNLVVSRVTEDSARLSWTAPDAAFDSFYIAYAEPRPDGEAIGLYVPGSERSYDLTGLKPGTEYSVLIHGVKGGLLSSPLGAFFTT

SEQ ID NO: 506 - protein, 90 aa, synthetic construct
MLPAPKNLVVSRVTEDSARLSWTAPDAAFDSFYIAYAEPRPDGEAILLQVPGSERSYDLTGLKPGTEYSVLIHGVKGGLLSSPLTAIFTT

SEQ ID NO: 507 - protein, 90 aa, synthetic construct
MLPAPKNLVVSRVTEDSARLSWTAPDAAFDSFYIAYAEPRPDGEAITLHVPGSERSYDLTGLKPGTEYSVLIHGVKGGLLSSPLSAIFTT

SEQ ID NO: 508 - protein, 90 aa, synthetic construct
MLPAPKNLVVSRVTEDSARLSWTAPDAAFDSFYIAYAEPRPDGEAIVLEVPGSERSYDLTGLKPGTEYSVLIHGVKGGLLSSPLDAHFTT

SEQ ID NO: 509 - protein, 90 aa, synthetic construct
MLPAPKNLVVSRVTEDSARLSWTAPDAAFDSFYIAYAEPRPDGEAIALHVPGSERSYDLTGLKPGTEYSVLIHGVKGGLLSSPLRAVFTT

SEQ ID NO: 510 - protein, 90 aa, synthetic construct
MLPAPKNLVVSRVTEDSARLSWTAPDAAFDSFYIAYAEPRPDGEAIQLWVPGSERSYDLTGLKPGTEYSVLIHGVKGGLLSSPLSAIFTT

SEQ ID NO: 511 - protein, 90 aa, synthetic construct
MLPAPKNLVVSRVTEDSARLSRTAPDAAFDSFYIAYAEPRPDGEAIVLIVPGSERSYDLTGLKPGTEYSVLIHGVKGGLLSSPLSAIFTT

SEQ ID NO: 512 - protein, 90 aa, synthetic construct
MLPAPKNLVVSRVTEDSARLSWTAPDAAFDSFFIGYLEPQPPGEAIQLWVPGSERSYDLTGLKPGTEYNVTIQGVKGGFPSRPLQAHFTT

SEQ ID NO: 513 - protein, 90 aa, synthetic construct
MLPAPKNLVVSRVTEDSARLSWTAPDAAFDSFYIAYAEPRPDGEAITLDVPGSERSYDLTGLKPGTEYSVLIHGVKGGLLSSPLYAFFTT

SEQ ID NO: 514 - protein, 90 aa, synthetic construct
MLPAPKNLVVSRVTEDSARLSWTAPDAAFDSFYIAYAEPRPDGEAIALHVPGSERSYDLTGLKPGTEYSVLIHGVKGGLLSSPLSAIFTT

SEQ ID NO: 515 - protein, 90 aa, synthetic construct
MLPAPKNLVVSRVTEDSARLSWTAPDAAFDSFYIAYAEPRPDGEAIGLWVPGSERSYDLTGLKPGTEYSVLIHGVKGGLLSSPLIAHFTT

SEQ ID NO: 516 - protein, 90 aa, synthetic construct
MLPAPKNLVVSRVTEDSARLSWTAPDAAFDSFYIAYAEPRPDGEAIWLVVPGSERSYDLTGLKPGTEYSVLIHGVKGGLLSSPLHARFTT

SEQ ID NO: 517 - protein, 90 aa, synthetic construct
MLPAPKNLVVSRVTEDSARLSWTAPDAAFDSFYIAYAEPRPDGEAIFLQVPGSERSYDLTGLKPGTEYSVLIHGVKGGLLSSPLAAVFTT

SEQ ID NO: 518 - protein, 90 aa, synthetic construct
MLPAPKNLVVSRVTEDSARLSWTAPDAAFDSFYIAYAEPRPDGEAILLHVPGSERSYDLTGLKPGTEYSVLIHGVKGGLLSSPLSAISTT

SEQ ID NO: 519 - protein, 90 aa, synthetic construct
MLPAPKNLVVSRVTEDSARLSWTAPDAAFDSFYIAYAEPRPDGEAIILQVPGSERSYDLTGLKPGTEYSVLIHGVKGGLLSSPLSAVFTT

SEQ ID NO: 520 - protein, 90 aa, synthetic construct
MLPAPKNLVVSRVTEDSARLSWTAPDAAFDSFYIAYAEPRPDGEAIYLKVPGSERSYDLTGLKPGTEYSVLIHGVKGGLLSSPLVAHFTT

SEQ ID NO: 521 - protein, 90 aa, synthetic construct
MLPAPKNLVVSRVTEDSARLSWTAPDAAFDSFYIAYAEPRPDGEAIVLTVPGSERSYDLTGLKPGTEYSVLIHGVKGGLLSSPLLAYFTT

SEQ ID NO: 522 - protein, 90 aa, synthetic construct
MLPAPKNLVVSRVTEDSARLSWTAPDAAFDSFYIAYAEPRPDGEAIILHVPGSERSYDLTGLKPGTEYSVLIHGVKGGLLSSPLEAKFTT

SEQ ID NO: 523 - protein, 89 aa, synthetic construct
MLPAPKNLVVSRVTEDSARLSWTAPDAAFDSFYIAYAEPRPDGEAIKLEVPGSERSYDLTGLKPGTEYSVLIHGVKGGLLSSPLAIFTT

SEQ ID NO: 524 - protein, 90 aa, synthetic construct
MLPAPKNLVVSRVTEDSARLSWTAPDAAFDSFFIGYLEPQPPGEAIYLEVPGSERSYDLTGLKPGTEYNVTIQGVKGGFPSFPLKAAFTT

SEQ ID NO: 525 - protein, 90 aa, synthetic construct
MLPAPKNLVVSRVTEDSARLSWTAPDAAFDSFYIAYAEPRPDGEAIILRVPGSERSYDLTGLKPGTEYSVLIHGVKGGLLSSPLVAIFTT

SEQ ID NO: 526 - protein, 90 aa, synthetic construct
MLPAPKNLVVSRVTEDSARLSWTAPDAAFDSFYIAYAEPRPDGEAIVLQVPGSERSYDLTGLKPGTEYSVLIHGVKGGLLSSPLAAWFTT

SEQ ID NO: 527 - protein, 90 aa, synthetic construct
MLPAPKNLVVSRVTEDSARLSWTAPDAAFDSFYIAYAEPRPDGEAIFLQVPGSERSYDLTGLKPGTEYSVLIHGVKGGLLSSPLNAFFTT

SEQ ID NO: 528 - protein, 90 aa, synthetic construct
MLPAPKNLVVSRVTEDSARLSWTAPDAAFDSFFIGYLEPQPPGEAIILGVPGSERSYDLTGLKPGTEYSVLIHGVKGGLLSSPLHAYSTT

SEQ ID NO: 529 - protein, 90 aa, synthetic construct
MLPAPKNLVVSRVTEDSARLSWTAPDAAFDSFYIAYAEPRPDGEAILLDVPGSERSYDLTGLKPGTEYSVLIHGVKGGLLSSPLSAIFTT

SEQ ID NO: 530 - protein, 90 aa, synthetic construct
MLPAPKNLVVSRVTEDSARLSWTAPDAAFDSFYIAYAEPRPDGEAILLLVPGSERSYDLTGLKPGTEYSVLIHGVKGGLLSSPLSAVFTT

SEQ ID NO: 531 - protein, 90 aa, synthetic construct
MLPAPKNLVVSRVTEDSARLSWTAPDAAFDSFYIAYAEPRPDGEAIHLLVPGSERSYDLTGLKPGTEYSVLIHGVKGGLLSSPLLAHFTT

SEQ ID NO: 532 - protein, 90 aa, synthetic construct
MLPAPKNLVVSRVTEDSARLSWTAPDAAFDSFYIAYAEPRPDGEAIQLWVPGSERSYDLTGLKPGTEYSVLIHGVKGGLLSSPLDAYFTT

SEQ ID NO: 533 - protein, 89 aa, synthetic construct
MLPAPKNLVVSRVTEDSARLSWTAPDAAFDSFFIGYLEPQPPGEAIVLTVPGSERSYDLTGLKPGTEYNVTIQGVKGGFPSMPLASFTT

SEQ ID NO: 534 - protein, 90 aa, synthetic construct
MLPAPKNLVVSRVTEDSARLSWTAPDAAFDSFHIVYHEPRPSGEAIHLQVPGSERSYDLTGLKPGTEYNVTIQGVKGGFPSYPLSAFFTT

SEQ ID NO: 535 - protein, 90 aa, synthetic construct
MLPAPKNLVVSRVTEDSARLSWTAPDAAFDSFFIGYLEPQPPGEAIQLWVPGSERSYDLTGLKPGTEYNVTIQGVKGGFPSMPLSAIFTT

SEQ ID NO: 536 - protein, 90 aa, synthetic construct
MLPAPKNLVVSRVTEDSARLSWTAPDAAFDSFRISYCETFYHGEAIVLTVPGSERSYDLTGLKPGTEYSVLIHGVKGGLLSSPLIAKFTT

SEQ ID NO: 537 - protein, 90 aa, synthetic construct
MLPAPKNLVVSRVTEDSARLSWTAPDAAFDSFYIAYAEPRPDGEAIWLKVPGSERSYDLTGLKPGTEYSVLIHGVKGGLLSSPLQANFTT

SEQ ID NO: 538 - protein, 90 aa, synthetic construct; identical to SEQ ID NO: 537

SEQ ID NO: 539 - protein, 90 aa, synthetic construct
MLPAPKNLVVSRVTEDSARLSWTAPDAAFDSFYIAYAEPRPDGEAIQLQVPGSERSYDLTGLKPGTEYSVLIHGVKGGLLSSPLSAIVTT

SEQ ID NO: 540 - protein, 90 aa, synthetic construct
MLPAPKNLVVSRVTEDSARLSWTAPDAAFDSFPIAYAEPRPDGEAIVLTVPGSERSYDLTGLKPGTEYSVLIHGVKGGLLSSPLSAFFTT

SEQ ID NO: 541 - protein, 90 aa, synthetic construct
MLPAPKNLVVSRVTEDSARLSWTAPDAAFDSFYIAYAEPRPDGEAIALLVPGSERSYDLTGLKPGTEYSVLIHGVKGGLLSSPLVAQFTT

SEQ ID NO: 542 - protein, 90 aa, synthetic construct; identical to SEQ ID NO: 522

SEQ ID NO: 543 - protein, 90 aa, synthetic construct
MLPAPKNLVVSRVTEDSARLSWTAPDAAFDSFYIAYAEPRPDGEAIDLHVPGSERSYDLTGLKPGTEYSVLIHGVKGGLLSSPLHALFTT

SEQ ID NO: 544 - protein, 90 aa, synthetic construct
MLPAPKNLVVSRVTEDSARLSWTAPDAAFDSFYIAYAEPRPDGEAILLDVPGSERSYDLTGLKPGTEYSVLIHGVKGGFPSMPLSAIFTT

SEQ ID NO: 545 - protein, 88 aa, synthetic construct
MLPAPKNLVVSRVTEDSARLSWTAPDAAFDSFFIGYLEPQPPGEAIDLAVPGSERSYDLTGLKPGTEYSVLIHGVKGGLLSSPLSFTT

SEQ ID NO: 546 - protein, 90 aa, synthetic construct
MLPAPKNLVVSRVTEDSARLSWTAPDAAFDSFYIAYAEPRPDGEAIYLGVPGSERSYDLTGLKPGTEYSVLIHGVKGGLLSSPLRAKFTT

SEQ ID NO: 547 - protein, 90 aa, synthetic construct
MLPAPKNLVVSRVTEDSARLSWTAPDAAFDSFYIAYAEPRPDGEAIQLGVPGSERSYDLTGLKPGTEYSVLIHGVKGGLLSSPLSAIFTT

SEQ ID NO: 548 - protein, 88 aa, synthetic construct
MLPAPKNLVVSRVTEDSARLSWTAPDAAFDSFFIGYLEPQPPGEAISLLVPDSERSYDLTGLKPGTEYNVTIQGVKGGFPSMPLKFTT

SEQ ID NO: 549 - protein, 90 aa, synthetic construct
MLPAPKNLVVSRVTEDSARLSWTAPDAAFDSFYIAYAEPRPDGEAIGLGVPGSERSYDLTGLKPGTEYSVLIHGVKGGLLSSPLDASFTT

SEQ ID NO: 550 - protein, 90 aa, synthetic construct
MLPAPKNLVVSRVTEDSARLSWTAPDAAFDSFYIAYAEPRPDGEAIQLTVPGSERSYDLTGPKPGTEYWVLIQGVKGGGSSVPLVAYFTT

SEQ ID NO: 551 - protein, 90 aa, synthetic construct
MLPAPKNLVVSRVTEDSARLSWTAPDAAFDSFYIAYAEPRPDGEAISLDVPGSERSYDLTGLKPGTEYSVLIHGVKGGLLSSPLEASFTT

SEQ ID NO: 552 - protein, 90 aa, synthetic construct
MLPAPKNLVVSRVTEDSARLSWTAPDAAFDSFFIGYLEPQPPGEAIILAVPGSERSYDLTGLKPGTEYNVTIQGVKGGFPSLPLVASFTT

SEQ ID NO: 553 - protein, 90 aa, synthetic construct
MLPAPKNLVVSRVTEDSARLSWTAPDAAFDSFDIGYTEYGGYGEAIYLSVPGSERSYDLTGLKPGTEYWVLIQGVKGGGSSVPLSAIFTT

SEQ ID NO: 554 - protein, 90 aa, synthetic construct
MLPAPKNLVVSRVTEDSARLSWTAPDAAFDSFYIAYAEPRPDGEAISLSVPGSERSYDLTGLKPGTEYSVLIHGVKGGLLSSPLIANFTT

SEQ ID NO: 555 - protein, 90 aa, synthetic construct
MLPAPKNLVVSRVTEDSARLSWTAPDAAFDSFYIAYAEPRPDGEAIALLVPGSERSYDLTGLKPGTEYSVLIHGVKGGLLSSPLSAIVTT

SEQ ID NO: 556 - protein, 90 aa, synthetic construct
MLPAPKNLVVSRVTEDSARLSWTAPDAAFDSFYIAYAEPRPDGEAIILDVPGSERSYDLTGLKPGTEYSVLIHGVKGGLLSSPLSSIFTT

SEQ ID NO: 557 - protein, 90 aa, synthetic construct
MLPAPKNLVVSRVTEDSARLSWTAPDAAFDSFYIAYAEPRPDGEAIVLWVPGSERSYDLTGLKPGTEYSVLIHGVKGGLLSSPLRASFTT

SEQ ID NO: 558 - protein, 90 aa, synthetic construct
MLPAPKNLVVSRVTEDSARLSWTAPDAAFDSFYIAYAEPRPDGEAIKLDVPGSERSYDLTGLKPGTEYSVLIHGVKGGLLSSPLVAFFTT

SEQ ID NO: 559 - protein, 90 aa, synthetic construct
MLPAPKNLVVSRVTEDSARLSWTAPDAAFDSFYIAYAEPRPDGEAIILEVPGSERSYDLTGLKPGTEYSVLIHGVKGGLLSSPLVAYFTT

SEQ ID NO: 560 - protein, 90 aa, synthetic construct
MLPAPKNLVVSRVTEDSARLSWTAPDAAFDSFYIAYAEPRPDGEAIHLWVPGSERSYDLTGLKPGTEYSVLIHGVKGGLLSSPLHADFTT

SEQ ID NO: 561 - protein, 90 aa, synthetic construct
MLPAPKNLVVSRVTEDSARLSWTAPDAAFDSFYIAYAEPRPDGEAIWLEVPGSERSYDLTGLKPGTEYSVLIHGVKGGLLSSPLVADFTT

SEQ ID NO: 562 - protein, 90 aa, synthetic construct
MLPAPKNLVVSRVTEDSARLSWTAPDAAFDSFYIAYAEPRPDGEAISLWVPGSERSYDLTGLKPGTEYSVLIHGVKGGLLSSPLLAHFTT

SEQ ID NO: 563 - protein, 89 aa, synthetic construct
MLPAPKNLVVSRVTEDSARLSWTAPDAAFDSFDIGYTEYGGYGEAILHVPGSERSYDLTGLKPGTEYWVLIQGVKGGGSSVPLSAIFTT

SEQ ID NO: 564 - protein, 90 aa, synthetic construct
MLPAPKNLVVSRVTEDSARLSWTAPDAAFDSFFIGYLEPQPPGEAIVLLVPGSERSYDLTGLKPGTEYNVTIQGVKGGFPSVPLAAFFTT

SEQ ID NO: 565 - protein, 85 aa, synthetic construct
MLPAPKNLVVSRVTEDSARLSWTAPDAAFDSFFIGYLEPQPPGEAILLWVPGSERSYDLTGLKPGTEYNVTIQGVKGGFPSQFTT

SEQ ID NO: 566 - protein, 93 aa, synthetic construct
MLPAPKNLVVSRVTEDSARLSWTAPDAAFDSFFIGYLEPQPPGEAILLGVPGSERSYDLTGLKPGTEYNVTIQGVKGGFPSMPLHPLVALFTT

SEQ ID NO: 567 - protein, 90 aa, synthetic construct
MLPAPKNLVVSRVTEDSARLSWTAPDAAFDSFYIAYAEPRPDGEAIGLDVPGSERSYDLTGLKPGTEYSVLIHGVKGGLLSSPLSAIFTT

SEQ ID NO: 568 - protein, 90 aa, synthetic construct
MLPAPKNLVVSRVTEDSARLSWTAPDAAFDSFYIAYAEPRPDGEAIHLSVPGSERSYDLTGLKPGTEYSVLIHGVKGGLLSSPLAAYFTT

SEQ ID NO: 569 - protein, 90 aa, synthetic construct
MLPAPKNLVVSRVTEDSARLSWTAPDAAFDSFFIGYLEPQPPGEAIVLAVPGSERSYDLTGLKPGTEYNVTIQGVKGGFPSYPLVAAFTT

SEQ ID NO: 570 - protein, 90 aa, synthetic construct
MLPAPKNLVVSRVTEDSARLSWTAPDAAFDSFYIAYAEPRPDGEAILLQVPGSCRSYDLTGLKPGTEYSVLIHGVKGGLLSSPLTAIFTT

SEQ ID NO: 571 - protein, 90 aa, synthetic construct
MLPAPKNLVVSRVTEDSARLSWTAPDAAFDSFFIGYLEPQPPGEAINLQVPGSERSYDLTGLKPGTEYNVTIQGVKGGFPSFPLSAVFTT

SEQ ID NO: 572 - protein, 90 aa, synthetic construct
MLPAPKNLVVSRVTEDSARLSWTAPDAAFDSFYIAYAEPRPDGEAIQLHVPGSERSYDLTGLKPGTEYSVLIHGVKGGLLSSPLVAIFTT

SEQ ID NO: 573 - protein, 90 aa, synthetic construct
MLPAPKNLVVSRVTEDSARLSWTAPDAAFDSFYIAYAEPRPDGEAIWLAVPGSERSYDLTGLKPGTEYSVLIHGVKGGLLSSPLHAQFTT

SEQ ID NO: 574 - protein, 87 aa, synthetic construct
MLPAPKNLVVSRVTEDSARLSWTAPDAAFDSFYIAYAEPRPDGEAILLGVPGSERSYDLTGLKPGTEYSVLIHGVKGGLLSSPLFTT

SEQ ID NO: 575 - protein, 90 aa, synthetic construct
MLPAPKNLVVSRVTEDSARLSWTAPDAAFDSFYIAYAEPRPDGEAIGLQVPGSERSYDLTGLKPGTEYSVLIHGVKGGLLSSPLCAEFTT

SEQ ID NO: 576 - protein, 90 aa, synthetic construct
MLPAPKNLVVSRVTEDSARLSWTAPDAAFDSFYIAYAEPRPDGEAIVLWVPGSERSYDLTGLKPGTEYSVLIHGVKGGLLSSPLIAEFTT

SEQ ID NO: 577 - protein, 88 aa, synthetic construct
MLPAPKNLVVSRVTEDSARLSWTAPDAAFDSFYIAYAEPRPDGEAISLSVPGSERSYDLTGLKPGTEYSVLIHGVKGGLLSSPPKFTT

SEQ ID NO: 578 - protein, 90 aa, synthetic construct
MLPAPKNLVVSRVTEDSARLSWTAPDAAFDSFYIAYAEPRPDGEAIILEVPGSERSYDLTGLKPGTEYSVLIHGVKGGLLSSPLRAVFTT

SEQ ID NO: 579 - protein, 90 aa, synthetic construct
MLPAPKNLVVSRVTEDSARLSWTAPDAAFDSFYIAYAEPRPDGEAIHLVVPGSERSYDLTGLKPGTEYSVLIHGVKGGLLSSPLSAIFTT

SEQ ID NO: 580 - protein, 90 aa, synthetic construct
MLPAPKNLVVSRVTEDSARLSWTAPDAAFDSFYIAYAEPRPDGEAISLKVPGSERSYDLTGLKPGTEYSVLIHGVKGGLLSSPLEAIFTT

SEQ ID NO: 581 - protein, 114 aa, synthetic construct
MLPAPKNPVVSRVTEDSARLSWTAPDAAFDSFYIAYAEPRPDGEAIHLLVPGSERSYDLTGLKPGTEYSVLIHGVKGGLLSSPLKRLSPPVVTITITMAVCRKPVAENLSQTLS

SEQ ID NO: 582 - protein, 89 aa, synthetic construct
MLPAPKNLVVSRVTEDSARLSWTAPDAAFDSFFIGYLEPQPPGEAIFLDVPGSERSYDLTGLKPGTEYNVTIQGVKGGFPSPLTAFFTT

SEQ ID NO: 583 - protein, 90 aa, synthetic construct
MLPAPKNLVVSRVTEDSARLSWTAPDAAFDSFFIGYLEPQPPGEAIVLDVPGSERSYDLTGLKPGTEYNVTIQGVKGGFPSHPLAAAFTT

SEQ ID NO: 584 - protein, 90 aa, synthetic construct
MLPAPKNLVVSRVTEDSARLSWTAPDAAFDSFFIGYLEPQPPGEAIGLAVPGSERSYDLTGLKPGTEYNVTIQGVKGGFPSVPLQANFTT

SEQ ID NO: 585 - protein, 90 aa, synthetic construct
MLPAPKNLVVSRVTEDSARLSWTAPDAAFDSFYIAYAEPRPDGEAILLRVPGSERSYDLTGLKPGTEYSVLIHGVKGGLLSSPLVAEFTT

SEQ ID NO: 586 - protein, 90 aa, synthetic construct
MLPAPKNLVVSRVTEDSARLSWTAPDAAFDSFYIAYAEPRPDGEAILLQVPGSERSYDLTGLKPGTEYSVLIHGVKGGLLSSPLSASFTT

SEQ ID NO: 587 - protein, 90 aa, synthetic construct
MLPAPKNLVVSRVTEDSARLSWTAPDAAFDSFYIAYAEPRPDGEAIGLHVPGSERSYDLTGLKPGTEYSVLIHGVKGGLLSSPLTASFTT

SEQ ID NO: 588 - protein, 90 aa, synthetic construct
MLPAPKNLVVSRVTEDSARLSWTAPDAAFDSFYIAYAEPRPDGEAIGLRVPGSERSYDLTGLKPGTEYSVLIHGVKGGLLSSPLSAIFTT

SEQ ID NO: 589 - protein, 90 aa, synthetic construct
MLPAPKNLVVSRVTEDSARLSWTAPDAAFDSFYIAYAEPRPDGEAIVLRVPGSERSYDLTGLKPGTEYSVLIHGVKGGLLSSPLAASFTT

SEQ ID NO: 590 - protein, 90 aa, synthetic construct
MLPAPKNLVVSRVTEDSARLSWTAPDAAFDSFYIAYAEPRPDGEAIQLLVPGSERSYDLTGLKPGTEYSVLIHGVKGGLLSSPLVAHFTT

SEQ ID NO: 591 - protein, 90 aa, synthetic construct
MLPAPKNLVVSRVTEDSARLSWTAPDAAFDSFYIAYAEPRPDGEAIWLLVPGSERSYDLTGLKPGTEYSVLIHGVKGGLLSSPLVAFFTT

SEQ ID NO: 592 - protein, 90 aa, synthetic construct
MLPAPKNLVVSRVTEDSARLSWTAPDAAFDSFFIGYLEPQPPGEAIHLYVPGSERSYDLTGLKPGTEYNVTIQGVKGGFPSDPLDAVFTT

SEQ ID NO: 593 - protein, 85 aa, synthetic construct
MLPAPKNLVVSRVTEDSARLSWTAPDAAFDSFFIGYLEPQPPGEAIYLDVPGSERSYDLTGLKPGTEYNVTIQGVKGGFPSTFTT

SEQ ID NO: 594 - protein, 90 aa, synthetic construct
MLPAPKNLVVSRVTEDSARLSWTAPDAAFDSFYIAYAEPRPDGEAIQLFVPGSERSYDLTGLKPGTEYSVLIHGVKGGLLSSPLKAYFTT

SEQ ID NO: 595 - protein, 90 aa, synthetic construct
MLPAPKNLVVSRVTEDSARLSWTAPDAAFDSFYIAYAEPRPDGEAIVLVVPGSERSYDLTGLKPGTEYSVLIHGVKGGLLSSPLSAIFTT

SEQ ID NO: 596 - protein, 90 aa, synthetic construct
MLPAPKNLVVSRVTEDSARLSWTAPDAAFDSFFIGYLEPQPPGEAIQLTVPGSERSYDLTGLKPGTEYNVTIQGVKGGFPSLPLSADFTT

SEQ ID NO: 597 - protein, 90 aa, synthetic construct
MLPAPKNLVVSRVTEDSARLSWTAPDAAFDSFYIAYAEPRPDGEAILLQVPGSERSYDLTGLKPGTEYSVLIHGVKGGLLSSPLDAEFTT

SEQ ID NO: 598 - protein, 90 aa, synthetic construct
MLPAPKNLVVSRVTEDSARLSWTAPDAAFDSFYIAYAEPRPDGEAIVLAVPGSERSYDLTGLKPGTEYSVLIHGVKGGLLSSPLYASFTT

SEQ ID NO: 599 - protein, 88 aa, synthetic construct
MLPAPKNLVVSRVTEDSARLSWTTPDAAFDSFYIAYAEPRPDGEAIRLQVPGSERSYDLTGLKPGTEYSVLIHGVKGGLLSSPLGFTT

SEQ ID NO: 600 - protein, 90 aa, synthetic construct
MLPAPKNLVVSRVTEDSARLSWTAPDAAFDSFYIAYAEPRPDGEAIQLVVPGSERSYDLTGLKPGTEYSVLIHGVKGGLLSSPLYAIFTT

SEQ ID NO: 601 - protein, 90 aa, synthetic construct
MLPAPKNLVVSRVTEDSARLSWTAPDAAFDSFYIAYAEPRPDGEAISLSVPGSERSYDLTGLKPGTEYSVLIHGVKGGLLSSPLHAKFTT

SEQ ID NO: 602 - protein, 90 aa, synthetic construct
MLPAPKNLVVSRVTEDSARLSWTAPDAAFDSFFIGYLEPQPPGEAIHLGVPGSERSYDLTGLKPGTEYNVTIQGVKGGFPSIPLFASFTT

SEQ ID NO: 603 - protein, 90 aa, synthetic construct
MLPAPKNLVVSRVTEDSARLSWTAPDAAFDSFYIAYAEPRPDGEAIQLLVPGSERSYDLTGLKPGTEYSVLIHGVKGGLLSSPLYAAFTT

SEQ ID NO: 604 - protein, 90 aa, synthetic construct
MLPAPKNLVVSRVTEDSARLSWTAPDAAFDSFFIGYLEPQPPGEAIHLAVPGSERSYDLTGLKPGTEYNVTIQGVKGGFPSVPLAAVFTT

SEQ ID NO: 605 - protein, 90 aa, synthetic construct
MLPAPKNLVVSRVTEDSARLSWTAPDAAFDSFYIAYAEPRPDGEAISLQVPGSERSYDLTGLKPGTEYSVLIHGVKGGLLSSPLGAHFTT

SEQ ID NO: 606 - protein, 90 aa, synthetic construct
MLPAPKNLVVSRVTEDSARLSWTAPDAAFDSFYIAYAEPRPDGEAIALWVPGSERSYDLTGLKPGTEYSVLIHGVKGGLLSSPLVASFTT

SEQ ID NO: 607 - protein, 90 aa, synthetic construct
MLPAPKNLVVSRVTEDSARLSWTAPDAAFDSFYIAYAEPRPDGEAIQLHVPGSERSYDLTGLKPGTEYSVLIHGVKGGLLSSPLYAFFTT

SEQ ID NO: 608 - protein, 90 aa, synthetic construct
MLPAPKNLVVSRVTEDSARLSWTAPDAAFDSFYIAYAEPRPDGEAILLHVPGSERSYDLTGLKPGTEYSVLIHGVKGGLLSSPLRASFTT

SEQ ID NO: 609 - protein, 90 aa, synthetic construct
MLPAPKNLVVSRVTEDSARLSWTAPDAAFDSFYIAYAEPRPDGEAIWLGVPGSERSYDLTGLKPGTEYSVLIHGVKGGLLSSPLHATFTT

SEQ ID NO: 610 - protein, 90 aa, synthetic construct
MLPAPKNLVVSRVTEDSARLSWTAPDAAFDSFYIAYAEPRPDGEAIVLEVPGSERSYDLTGLKPGTEYSVLIHGVKGGLLSSPLHANFTT

SEQ ID NO: 611 - protein, 90 aa, synthetic construct
MLPAPKNLVVSRVTEDSARLSWTAPDAAFDSFYIAYAEPRPDGEAILLRVPGSERSYDLTGLKPGTEYSVLIHGVKGGLLSSPLYAKFTT

SEQ ID NO: 612 - protein, 90 aa, synthetic construct
MLPAPKNLVVSRVTEDSARLSWTAPDAAFDSFFIGYLEPQPPGEAIGLWVPGSERSYDLTGLKPGTEYNVTIQGVKGGFPSDPLQAVFTT

SEQ ID NO: 613 - protein, 90 aa, synthetic construct
MLPAPKNLVVSRVTEDSARLSWTAPDAAFDSFYIAYAEPRPDGEAIVLHVPGSERSYDLTGLKPGTEYSVLIHGVKGGLLSSPLDAFFTT

SEQ ID NO: 614 - protein, 90 aa, synthetic construct
MLPAPKNLVVSRVTEDSARLSWTAPDAAFDSFYIAYAEPRPDGEAIILHVPGSERSYDLTGLKPGTEYSVLIHGVKGGLLSSPLDAYFTT

SEQ ID NO: 615 - protein, 90 aa, synthetic construct
MLPAPKNLVVSRVTEDSARLSWTAPDAAFDSFYIAYAEPRPDGEAILLAVPGSERSYDLTGLKPGTEYSVLIHGVKGGLLSSPLSAKFTT

SEQ ID NO: 616 - protein, 90 aa, synthetic construct
MLPAPKNLVVSRVTEDSARLSWTAPDAAFDSFFIGYLEPQPPGEAILLFVPGSERSYDLTGLKPGTEYNVTIQGVKGGFPSTPLSASFTT

SEQ ID NO: 617 - protein, 90 aa, synthetic construct
MLPAPKNLVVSRVTEDSARLSWTAPDAAFDSFYIAYAEPRPDGEAIQLTVPGSERSYDLTGLKPGTEYSVLIHGVKGGLLSSPLHAYFTT

SEQ ID NO: 618 - protein, 90 aa, synthetic construct
MLPAPKNLVVSRVTEDSARLSWTAPDAAFDSFYIAYAEPRPDGEAIQLGVPGSERSYDLTGLKPGTEYSVLIHGVKGGLLSSPLRAYFTT

SEQ ID NO: 619 - protein, 90 aa, synthetic construct
MLPAPKNLVVSRVTEDSARLSWTAPDAAFDSFYIAYAEPRPDGEAILLEVPGSERSYDLTGLKPGTEYSVLIHGVKGGLLSSPLVAFFTT

SEQ ID NO: 620 - protein, 90 aa, synthetic construct
MLPAPKNLVVSRVTEDSARLSWTAPDAAFDSFYIAYAEPRPDGEAIQLGVPGSERSYDLTGLKPGTEYSVLIHGVKGGLLSSPLLAVFTT

SEQ ID NO: 621 - protein, 90 aa, synthetic construct
MLPAPKNLVVSRVTEDSARLSWTAPDAAFDSFYIAYAEPRPDGEAIHLRVPGSERSYDLTGLKPGTEYNVTIQGVKGGFPSMPLSAIFTT

SEQ ID NO: 622 - protein, 90 aa, synthetic construct
MLPAPKNLVVSRVTEDSARLSWTAPDAAFDSFYIAYAEPRPDGEAILLQVPGSERSYDLTGLKPGTEYSVLIHGVKGGLLSSPLIAKFTT

SEQ ID NO: 623 - protein, 90 aa, synthetic construct
MLPAPKNLVVSRVTEDSARLSWTAPDAAFDSFYIAYAEPRPDGEAIVLHVPGSERSYDLTGLKPGTEYSVLIHGVKGGLLSSPLQAIFTT

SEQ ID NO: 624 - protein, 90 aa, synthetic construct
MLPAPKNLVVSRVTEDSARLSWTAPDAAFDSFYIAYAEPRPDGEAIALVVPGSERSYDLTGLKPGTEYSVLIHGVKGGLLSSPLAANFTT

SEQ ID NO: 625 - protein, 90 aa, synthetic construct
MLPAPKNLVVSRVTEDSARLSWTAPDAAFDSFYIAYAEPRPDGEAINLSVPGSERSYDLTGLKPGTEYSVLIHGVKGGLLSSPLDAYFTT

SEQ ID NO: 626 - protein, 90 aa, synthetic construct
MLPAPKNLVVSRVTEDSARLSWTAPDAAFDSFYIAYAEPRPDGEAIVLEVPGSERSYDLTGLKPGTEYSVLIHGVKGGLLSSPLTASFTT

SEQ ID NO: 627 - protein, 90 aa, synthetic construct
MLPAPKNLVVSRVTEDSARLSWTAPDAAFDSFYIAYAEPRPDGEAIRLQVPGSERSYDLTGLKPGTEYSVLIHGVKGGLLSSPLGASFTT

SEQ ID NO: 628 - protein, 90 aa, synthetic construct
MLPAPKNLVVSRVTEDSARLSWTAPDAAFDSFYIAYAEPRPDGEAIGLWVPGSERSYDLTGLKPGTEYSVLIHGVKGGLLSSPLVAYFTT

SEQ ID NO: 629 - protein, 87 aa, synthetic construct
MLPAPKNLVVSRVTEDSARLSWTAPDAAFDSFYIAYAEPRPDGEAIYLEVPGSERSYDLTGLKPGTEYSVLIHGVKGGLLSSPLFTT

SEQ ID NO: 630 - protein, 90 aa, synthetic construct
MLPAPKNLVVSRVTEDSARLSWTAPDAAFDSFYIAYAEPRPDGEAIWLDVPGSERSYDLTGLKPGTEYSVLIHGVKGGLLSSPLDAYFTT

SEQ ID NO: 631 - protein, 90 aa, synthetic construct
MLPAPKNLVVSRVTEDSARLSWTAPDAAFDSFAIEYCETKMCGEAIVLTVPGSERSYDLTGLKPGTEYRVPIPGVKGGTASLPLSAIFTT

SEQ ID NO: 632 - protein, 90 aa, synthetic construct
MLPAPKNLVVSRVTEDSARLSWTAPDAAFDSFFIYYIESYPAGEAIVLTVPGSERSYDLTGLKPGTEYWVGIDGVKGGRWSTPLSAIFTT

SEQ ID NO: 633 - protein, 90 aa, synthetic construct
MLPAPKNLVVSRVTEDSARLSWTAPDAAFDSFFIYYIESYPAGEAIVLTVPGSCRSYDLTGLKPGTEYWVGIDGVKGGRWSTPLSAIFTT

SEQ ID NO: 634 - protein, 189 aa, synthetic construct
MLPAPKNLVVSRVTEDSARLSWTAPDAAFDSFAIVYHEPRPDGEAIVLTVPGSCRSYDLTGLKPGTEYEVVILGVKGGVHSYPLSAIFTTAPAPAPAPAPLPAPKNLVVSRVTEDSARLSWTAPDAAFDSFAIVYHEPRPDGEAIVLTVPGSERSYDLTGLKPGTEYEVVILGVKGGVHSYPLSAIFTT

SEQ ID NO: 635 - protein, 199 aa, synthetic construct
MLPAPKNLVVSRVTEDSARLSWTAPDAAFDSFAIVYHEPRPDGEAIVLTVPGSCRSYDLTGLKPGTEYEVVILGVKGGVHSYPLSAIFTTGGGGSGGGGSGGGGSGGGGSLPAPKNLVVSRVTEDSARLSWTAPDAAFDSFAIVYHEPRPDGEAIVLTVPGSERSYDLTGLKPGTEYEVVILGVKGGVHSYPLSAIFTT

SEQ ID NO: 636 - protein, 199 aa, synthetic construct
MLPAPKNLVVSRVTEDSARLSWTAPDAAFDSFAIVYHEPRPDGEAIVLTVPGSCRSYDLTGLKPGTEYEVVILGVKGGVHSYPLSAIFTTEAAAKEAAAKEAAAKEAAAKLPAPKNLVVSRVTEDSARLSWTAPDAAFDSFAIVYHEPRPDGEAIVLTVPGSERSYDLTGLKPGTEYEVVILGVKGGVHSYPLSAIFTT

SEQ ID NO: 637 - protein, 184 aa, synthetic construct
MLPAPKNLVVSRVTEDSARLSWTAPDAAFDSFAIVYHEPRPDGEAIVLTVPGSCRSYDLTGLKPGTEYEVVILGVKGGVHSYPLSAIFTTEAAAKLPAPKNLVVSRVTEDSARLSWTAPDAAFDSFAIVYHEPRPDGEAIVLTVPGSERSYDLTGLKPGTEYEVVILGVKGGVHSYPLSAIFTT

SEQ ID NO: 638 - protein, 189 aa, synthetic construct
MLPAPKNLVVSRVTEDSARLSWTAPDAAFDSFKIEYFEYVGYGEAIVLTVPGSCRSYDLTGLKPGTEYYVAIYGVKGGWYSRPLSAIFTTAPAPAPAPAPLPAPKNLVVSRVTEDSARLSWTAPDAAFDSFKIEYFEYVGYGEAIVLTVPGSERSYDLTGLKPGTEYYVAIYGVKGGWYSRPLSAIFTT

SEQ ID NO: 639 - protein, 199 aa, synthetic construct
MLPAPKNLVVSRVTEDSARLSWTAPDAAFDSFKIEYFEYVGYGEAIVLTVPGSCRSYDLTGLKPGTEYYVAIYGVKGGWYSRPLSAIFTTGGGGSGGGGSGGGGSGGGGSLPAPKNLVVSRVTEDSARLSWTAPDAAFDSFKIEYFEYVGYGEAIVLTVPGSERSYDLTGLKPGTEYYVAIYGVKGGWYSRPLSAIFTT

SEQ ID NO: 640 - protein, 199 aa, synthetic construct
MLPAPKNLVVSRVTEDSARLSWTAPDAAFDSFKIEYFEYVGYGEAIVLTVPGSCRSYDLTGLKPGTEYYVAIYGVKGGWYSRPLSAIFTTEAAAKEAAAKEAAAKEAAAKLPAPKNLVVSRVTEDSARLSWTAPDAAFDSFKIEYFEYVGYGEAIVLTVPGSERSYDLTGLKPGTEYYVAIYGVKGGWYSRPLSAIFTT

SEQ ID NO: 641 - protein, 184 aa, synthetic construct
MLPAPKNLVVSRVTEDSARLSWTAPDAAFDSFKIEYFEYVGYGEAIVLTVPGSCRSYDLTGLKPGTEYYVAIYGVKGGWYSRPLSAIFTTEAAAKLPAPKNLVVSRVTEDSARLSWTAPDAAFDSFKIEYFEYVGYGEAIVLTVPGSERSYDLTGLKPGTEYYVAIYGVKGGWYSRPLSAIFTT

SEQ ID NO: 642 - protein, 90 aa, synthetic construct
MLPAPKNLVVSRVTEDSARLSWTAPDAAFDSFAIVYHEPRPDGEAIVLTVPGSCRSYDLTGLKPGTEYEVVILGVKGGVHSYPLSAIFTT

SEQ ID NO: 643 - protein, 90 aa, synthetic construct
MLPAPKNLVVSRVTEDSARLSWTAPDAAFDSFAIVYHEPRPDGEAIVLTVPGSERSYDLTGLKPGTEYEVVILGVKGGVHSYPLSAIFTT

SEQ ID NO: 644 - protein, 90 aa, synthetic construct
MLPAPKNLVVSRVTEDSARLSWTAPDAAFDSFFIGYLEPQPPGEAIHLGVPGSCRSYDLTGLKPGTEYNVTIQGVKGGFPSIPLFASFTT

SEQ ID NO: 645 - protein, 4 aa, synthetic construct
GSGS

SEQ ID NO: 646 - protein, 8 aa, synthetic construct
GGGSGGGS

SEQ ID NO: 647 - protein, 25 aa, synthetic construct
  VARIANT 6..25: note = GGGGS repeats may be deleted
GGGGSGGGGSGGGGSGGGGSGGGGS

SEQ ID NO: 648 - protein, 25 aa, synthetic construct
GGGGSGGGGSGGGGSGGGGSGGGGS

SEQ ID NO: 649 - protein, 25 aa, synthetic construct
  VARIANT 6..25: note = GGGGA repeats may be deleted
GGGGAGGGGAGGGGAGGGGAGGGGA

SEQ ID NO: 650 - protein, 40 aa, synthetic construct
  VARIANT 3..40: note = AP repeats may be deleted
APAPAPAPAPAPAPAPAPAPAPAPAPAPAPAPAPAPAPAP

SEQ ID NO: 651 - protein, 40 aa, synthetic construct; identical to SEQ ID NO: 650
  VARIANT 5..40: note = AP repeats may be deleted

SEQ ID NO: 652 - protein, 4 aa, synthetic construct
APAP

SEQ ID NO: 653 - protein, 10 aa, synthetic construct
APAPAPAPAP

SEQ ID NO: 654 - protein, 20 aa, synthetic construct
APAPAPAPAPAPAPAPAPAP

SEQ ID NO: 655 - protein, 40 aa, synthetic construct; identical to SEQ ID NO: 650

SEQ ID NO: 656 - protein, 29 aa, synthetic construct
AEAAAKEAAAKEAAAKEAAAKEAAAKAAA

SEQ ID NO: 657 - protein, 25 aa, synthetic construct
  VARIANT 6..25: note = EAAAK repeats may be deleted
EAAAKEAAAKEAAAKEAAAKEAAAK

SEQ ID NO: 658 - protein, 20 aa, synthetic construct
EAAAKEAAAKEAAAKEAAAK

SEQ ID NO: 659 - protein, 20 aa, synthetic construct
GGGGSGGGGSGGGGSGGGGS

SEQ ID NO: 660 - protein, 10 aa, synthetic construct
APAPAPAPAP

SEQ ID NO: 661 - protein, 5 aa, synthetic construct
EAAAK

SEQ ID NO: 662 - protein, 6 aa, synthetic construct
HHHHHH

SEQ ID NO: 663 - protein, 90 aa, synthetic construct; identical to SEQ ID NO: 362

SEQ ID NO: 664 - protein, 90 aa, synthetic construct; identical to SEQ ID NO: 407

SEQ ID NO: 665 - protein, 90 aa, synthetic construct; identical to SEQ ID NO: 361

SEQ ID NO: 666 - protein, 90 aa, synthetic construct; identical to SEQ ID NO: 425

SEQ ID NO: 667 - protein, 90 aa, synthetic construct; identical to SEQ ID NO: 364

SEQ ID NO: 668 - protein, 90 aa, synthetic construct; identical to SEQ ID NO: 363

SEQ ID NO: 669 - protein, 90 aa, synthetic construct; identical to SEQ ID NO: 643

SEQ ID NO: 670 - protein, 90 aa, synthetic construct; identical to SEQ ID NO: 443

SEQ ID NO: 671 - protein, 90 aa, synthetic construct; identical to SEQ ID NO: 444

SEQ ID NO: 672 - protein, 90 aa, synthetic construct; identical to SEQ ID NO: 506

SEQ ID NO: 673 - RNA, 19 nt, synthetic construct
  source 1..19: mol_type = other RNA
agaaccacccactgcatga

SEQ ID NO: 674 - RNA, 19 nt, synthetic construct
  source 1..19: mol_type = other RNA
agaaaaacagtacctaata

SEQ ID NO: 675 - RNA, 19 nt, synthetic construct
  source 1..19: mol_type = other RNA
gaaactggtgagtgactga

SEQ ID NO: 676 - RNA, 19 nt, synthetic construct
  source 1..19: mol_type = other RNA
aaactggtgagtgactgca

SEQ ID NO: 677 - RNA, 19 nt, synthetic construct
  source 1..19: mol_type = other RNA
agttcactgaaacggaata

SEQ ID NO: 678 - RNA, 19 nt, synthetic construct
  source 1..19: mol_type = other RNA
ggaatgccttccttgcgga

SEQ ID NO: 679 - RNA, 19 nt, synthetic construct
  source 1..19: mol_type = other RNA
tgccttccttgcggtgaaa

SEQ ID NO: 680 - RNA, 19 nt, synthetic construct
  source 1..19: mol_type = other RNA
gccttccttgcggtgaaaa

SEQ ID NO: 681 - RNA, 19 nt, synthetic construct
  source 1..19: mol_type = other RNA
ccttccttgcggtgaaaga

SEQ ID NO: 682 - RNA, 19 nt, synthetic construct
  source 1..19: mol_type = other RNA
cttccttgcggtgaaagca

SEQ ID NO: 683 - RNA, 19 nt, synthetic construct
  source 1..19: mol_type = other RNA
ttccttgcggtgaaagcga

SEQ ID NO: 684 - RNA, 19 nt, synthetic construct
  source 1..19: mol_type = other RNA
tccttgcggtgaaagcgaa

SEQ ID NO: 685 - RNA, 19 nt, synthetic construct
  source 1..19: mol_type = other RNA
ccttgcggtgaaagcgaaa

SEQ ID NO: 686 - RNA, 19 nt, synthetic construct
  source 1..19: mol_type = other RNA
cttgcggtgaaagcgaata

SEQ ID NO: 687 - RNA, 19 nt, synthetic construct
  source 1..19: mol_type = other RNA
ttgcggtgaaagcgaatta

SEQ ID NO: 688 - RNA, 19 nt, synthetic construct
  source 1..19: mol_type = other RNA
tgcggtgaaagcgaattca

SEQ ID NO: 689 - RNA, 19 nt, synthetic construct
  source 1..19: mol_type = other RNA
cggtgaaagcgaattccta

SEQ ID NO: 690 - RNA, 19 nt, synthetic construct
  source 1..19: mol_type = other RNA
ggtgaaagcgaattcctaa

SEQ ID NO: 691 - RNA, 19 nt, synthetic construct
  source 1..19: mol_type = other RNA
tgaaagcgaattcctagaa

SEQ ID NO: 692 - RNA, 19 nt, synthetic construct
  source 1..19: mol_type = other RNA
gaaagcgaattcctagaca

SEQ ID NO: 693 - RNA, 19 nt, synthetic construct
  source 1..19: mol_type = other RNA
aaagcgaattcctagacaa

SEQ ID NO: 694 - RNA, 19 nt, synthetic construct
  source 1..19: mol_type = other RNA
aagcgaattcctagacaca

SEQ ID NO: 695 - RNA, 19 nt, synthetic construct
  source 1..19: mol_type = other RNA
agcgaattcctagacacca

SEQ ID NO: 696 - RNA, 19 nt, synthetic construct
  source 1..19: mol_type = other RNA
ctagacacctggaacagaa

SEQ ID NO: 697 - RNA, 19 nt, synthetic construct
  source 1..19: mol_type = other RNA
cagcacaaatactgcgaca

SEQ ID NO: 698 - RNA, 19 nt, synthetic construct
  source 1..19: mol_type = other RNA
agcacaaatactgcgacca

SEQ ID NO: 699 - RNA, 19 nt, synthetic construct
  source 1..19: mol_type = other RNA
gcacaaatactgcgaccca

SEQ ID NO: 700 - RNA, 19 nt, synthetic construct
  source 1..19: mol_type = other RNA
tactgcgaccccaacctaa

SEQ ID NO: 701 - RNA, 19 nt, synthetic construct
  source 1..19: mol_type = other RNA
actgcgaccccaacctaga

SEQ ID NO: 702 - RNA, 19 nt, synthetic construct
  source 1..19: mol_type = other RNA
ctgcgaccccaacctagga

SEQ ID NO: 703 - RNA, 19 nt, synthetic construct
  source 1..19: mol_type = other RNA
gaccccaacctagggctta

SEQ ID NO: 704 - RNA, 19 nt, synthetic construct
  source 1..19: mol_type = other RNA
accccaacctagggcttca

SEQ ID NO: 705 - RNA, 19 nt, synthetic construct
  source 1..19: mol_type = other RNA
ccccaacctagggcttcga

SEQ ID NO: 706 - RNA, 19 nt, synthetic construct
  source 1..19: mol_type = other RNA
cctagggcttcgggtccaa

SEQ ID NO: 707 - RNA, 19 nt, synthetic construct
  source 1..19: mol_type = other RNA
tcgggtccagcagaaggga

SEQ ID NO: 708 - RNA, 19 nt, synthetic construct
  source 1..19: mol_type = other RNA
gaaggctggcactgtacga

SEQ ID NO: 709 - RNA, 19 nt, synthetic construct
  source 1..19: mol_type = other RNA
ggcactgtacgagtgagga

SEQ ID NO: 710 - RNA, 19 nt, synthetic construct
  source 1..19: mol_type = other RNA
gtacgagtgaggcctgtga

SEQ ID NO: 711 - RNA, 19 nt, synthetic construct
  source 1..19: mol_type = other RNA
tgtcctgcaccgctcatga

SEQ ID NO: 712 - RNA, 19 nt, synthetic construct
  source 1..19: mol_type = other RNA
tgcaccgctcatgctcgca

SEQ ID NO: 713 - RNA, 19 nt, synthetic construct
  source 1..19: mol_type = other RNA
gcaccgctcatgctcgcca

SEQ ID NO: 714 - RNA, 19 nt, synthetic construct
  source 1..19: mol_type = other RNA
ccgctcatgctcgcccgga

SEQ ID NO: 715 - RNA, 19 nt, synthetic construct
  source 1..19: mol_type = other RNA
cccggctttggggtcaaga

SEQ ID NO: 716 - RNA, 19 nt, synthetic construct
  source 1..19: mol_type = other RNA
ctgataccatctgcgagca

SEQ ID NO: 717 - RNA, 19 nt, synthetic construct
  source 1..19: mol_type = other RNA
tgataccatctgcgagcca

SEQ ID NO: 718 - RNA, 19 nt, synthetic construct
  source 1..19: mol_type = other RNA
ctgcccagtcggcttctta

SEQ ID NO: 719 - RNA, 19 nt, synthetic construct
  source 1..19: mol_type = other RNA
gtgtcatctgctttcgaaa

SEQ ID NO: 720 - RNA, 19 nt, synthetic construct
  source 1..19: mol_type = other RNA
tgtcatctgctttcgaaaa

SEQ ID NO: 721 - RNA, 19 nt, synthetic construct
  source 1..19: mol_type = other RNA
tcatctgctttcgaaaaaa

SEQ ID NO: 722 - RNA, 19 nt, synthetic construct
  source 1..19: mol_type = other RNA
ttcgaaaaatgtcacccta

SEQ ID NO: 723 - RNA, 19 nt, synthetic construct
  source 1..19: mol_type = other RNA
tcgaaaaatgtcaccctta

SEQ ID NO: 724 - RNA, 19 nt, synthetic construct
  source 1..19: mol_type = other RNA
aaaatgtcacccttggaca

SEQ ID NO: 725 - RNA, 19 nt, synthetic construct
  source 1..19: mol_type = other RNA
tgatccccatcatcttcga

SEQ ID NO: 726 - RNA, 19 nt, synthetic construct
  source 1..19: mol_type = other RNA
ccccatcatcttcgggata

SEQ ID NO: 727 - RNA, 19 nt, synthetic construct
  source 1..19: mol_type = other RNA
atcttcgggatcctgttta

SEQ ID NO: 728 - RNA, 19 nt, synthetic construct
  source 1..19: mol_type = other RNA
aagaagccaaccaataaga

SEQ ID NO: 729 - RNA, 19 nt, synthetic construct
  source 1..19: mol_type = other RNA
aagccaaccaataaggcca

SEQ ID NO: 730 - RNA, 19 nt, synthetic construct
  source 1..19: mol_type = other RNA
agatcaattttcccgacga

SEQ ID NO: 731 - RNA, 19 nt, synthetic construct
  source 1..19: mol_type = other RNA
gatcaattttcccgacgaa

SEQ ID NO: 732 - RNA, 19 nt, synthetic construct
  source 1..19: mol_type = other RNA
atcaattttcccgacgata

SEQ ID NO: 733 - RNA, 19 nt, synthetic construct
  source 1..19: mol_type = other RNA
tcaattttcccgacgatca

SEQ ID NO: 734 - RNA, 19 nt, synthetic construct
  source 1..19: mol_type = other RNA
cgacgatcttcctggctca

SEQ ID NO: 735 - RNA, 19 nt, synthetic construct
  source 1..19: mol_type = other RNA
acgatcttcctggctccaa

SEQ ID NO: 736 - RNA, 19 nt, synthetic construct
  source 1..19: mol_type = other RNA
gatcttcctggctccaaca

SEQ ID NO: 737 - RNA, 19 nt, synthetic construct
  source 1..19: mol_type = other RNA
tgcaggagactttacatga

SEQ ID NO: 738 - RNA, 19 nt, synthetic construct
  source 1..19: mol_type = other RNA
caggagactttacatggaa

SEQ ID NO: 739 - RNA, 19 nt, synthetic construct
  source 1..19: mol_type = other RNA
ggagactttacatggatga

SEQ ID NO: 740 - RNA, 19 nt, synthetic construct
  source 1..19: mol_type = other RNA
aggatggcaaagagagtca

SEQ ID NO: 741 - RNA, 19 nt, synthetic construct
  source 1..19: mol_type = other RNA
ggatggcaaagagagtcga

SEQ ID NO: 742 - RNA, 19 nt, synthetic construct
  source 1..19: mol_type = other RNA
tggcaaagagagtcgcata

SEQ ID NO: 743 - RNA, 19 nt, synthetic construct
  source 1..19: mol_type = other RNA
ggcaaagagagtcgcatca

SEQ ID NO: 744 - RNA, 19 nt, synthetic construct
  source 1..19: mol_type = other RNA
gcaaagagagtcgcatcta

SEQ ID NO: 745 - RNA, 19 nt, synthetic construct
  source 1..19: mol_type = other RNA
aaagagagtcgcatctcaa

SEQ ID NO: 746 - RNA, 19 nt, synthetic construct
  source 1..19: mol_type = other RNA
aagagagtcgcatctcaga

SEQ ID NO: 747 - RNA, 19 nt, synthetic construct
  source 1..19: mol_type = other RNA
agagagtcgcatctcagta

SEQ ID NO: 748 - RNA, 19 nt, synthetic construct
  source 1..19: mol_type = other RNA
gagagtcgcatctcagtga

SEQ ID NO: 749 - RNA, 19 nt, synthetic construct
  source 1..19: mol_type = other RNA
agagtcgcatctcagtgca

SEQ ID NO: 750 - RNA, 19 nt, synthetic construct
  source 1..19: mol_type = other RNA
gagtcgcatctcagtgcaa

SEQ ID NO: 751 - RNA, 19 nt, synthetic construct
  source 1..19: mol_type = other RNA
gtcgcatctcagtgcagga

SEQ ID NO: 752 - RNA, 19 nt, synthetic construct
  source 1..19: mol_type = other RNA
ctgctgtggcgtgagggta

SEQ ID NO: 753 - RNA, 19 nt, synthetic construct
  source 1..19: mol_type = other RNA
ggcactgactgggcataga

SEQ ID NO: 754 - RNA, 19 nt, synthetic construct
  source 1..19: mol_type = other RNA
gggcatagctccccgctta

SEQ ID NO: 755 - RNA, 19 nt, synthetic construct
  source 1..19: mol_type = other RNA
agaacctctcacttcacca

SEQ ID NO: 756 - RNA, 19 nt, synthetic construct
  source 1..19: mol_type = other RNA
gaacctctcacttcaccca

SEQ ID NO: 757 - RNA, 19 nt, synthetic construct
  source 1..19: mol_type = other RNA
agtctcccaacttgtatta

SEQ ID NO: 758 - RNA, 19 nt, synthetic construct
  source 1..19: mol_type = other RNA
ggtttagtaatatccacca

SEQ ID NO: 759 - RNA, 19 nt, synthetic construct
  source 1..19: mol_type = other RNA
gtttagtaatatccaccaa

SEQ ID NO: 760 - RNA, 19 nt, synthetic construct
  source 1..19: mol_type = other RNA
tttagtaatatccaccaga

SEQ ID NO: 761 - RNA, 19 nt, synthetic construct
  source 1..19: mol_type = other RNA
gtaatatccaccagaccta

SEQ ID NO: 762 - RNA, 19 nt, synthetic construct
  source 1..19: mol_type = other RNA
taatatccaccagacctta

SEQ ID NO: 763 - RNA, 19 nt, synthetic construct
  source 1..19: mol_type = other RNA
catggtggcttccctgcga

SEQ ID NO: 764 - RNA, 19 nt, synthetic construct
  source 1..19: mol_type = other RNA
tgcgcccaggaagccataa

SEQ ID NO: 765 - RNA, 19 nt, synthetic construct
  source 1..19: mol_type = other RNA
cgcccaggaagccatataa

SEQ ID NO: 766 - RNA, 19 nt, synthetic construct
  source 1..19: mol_type = other RNA
agccatatacacagatgca

SEQ ID NO: 767 - RNA, 19 nt, synthetic construct
  source 1..19: mol_type = other RNA
gccatatacacagatgcca

SEQ ID NO: 768 - RNA, 19 nt, synthetic construct
  source 1..19: mol_type = other RNA
ttgtttgtgatagtgaaca

SEQ ID NO: 769 - RNA, 19 nt, synthetic construct
  source 1..19: mol_type = other RNA
ggaagctgcttaactgtca

SEQ ID NO: 770 - RNA, 19 nt, synthetic construct
  source 1..19: mol_type = other RNA
gctgcttaactgtccatca

SEQ ID NO: 771 - RNA, 19 nt, synthetic construct
  source 1..19: mol_type = other RNA
agcaggagactggctaaaa

SEQ ID NO: 772 - RNA, 19 nt, synthetic construct
  source 1..19: mol_type = other RNA
gcaggagactggctaaata

SEQ ID NO: 773 - RNA, 19 nt, synthetic construct
  source 1..19: mol_type = other RNA
caggagactggctaaataa

SEQ ID NO: 774 - RNA, 19 nt, synthetic construct
  source 1..19: mol_type = other RNA
atacaacagaatctcaaaa

SEQ ID NO: 775 - RNA, 19 nt, synthetic construct
  source 1..19: mol_type = other RNA
cagaaaacccacagctcga

SEQ ID NO: 776 - RNA, 19 nt, synthetic construct
  source 1..19: mol_type = other RNA
acccacagctcgaagagta

SEQ ID NO: 777 - RNA, 19 nt, synthetic construct
  source 1..19: mol_type = other RNA
gctcgaagagtggtgacga

SEQ ID NO: 778 - RNA, 19 nt, synthetic construct
  source 1..19: mol_type = other RNA
tcgaagagtggtgacgtca

SEQ ID NO: 779 - RNA, 19 nt, synthetic construct
  source 1..19: mol_type = other RNA
gaagagtggtgacgtctga

SEQ ID NO: 780 - RNA, 19 nt, synthetic construct
  source 1..19: mol_type = other RNA
ggttggttaaagggagata

SEQ ID NO: 781 - RNA, 19 nt, synthetic construct
  source 1..19: mol_type = other RNA
ttggctttcccataatgca

SEQ ID NO: 782 - RNA, 19 nt, synthetic construct
  source 1..19: mol_type = other RNA
ccctgcccagtcggcttca

SEQ ID NO: 783 - RNA, 19 nt, synthetic construct
  source 1..19: mol_type = other RNA
cctgcccagtcggcttcta

SEQ ID NO: 784 - RNA, 19 nt, synthetic construct
  source 1..19: mol_type = other RNA
tgcccagtcggcttcttca

SEQ ID NO: 785 - RNA, 19 nt, synthetic construct
  source 1..19: mol_type = other RNA
gcccagtcggcttcttcta

SEQ ID NO: 786 - RNA, 19 nt, synthetic construct
  source 1..19: mol_type = other RNA
ccagtcggcttcttctcca

SEQ ID NO: 787 - RNA, 19 nt, synthetic construct
  source 1..19: mol_type = other RNA
cagtcggcttcttctccaa

SEQ ID NO: 788 - RNA, 19 nt, synthetic construct
  source 1..19: mol_type = other RNA
agtcggcttcttctccaaa

SEQ ID NO: 789 - RNA, 19 nt, synthetic construct
  source 1..19: mol_type = other RNA
gctgctccagtgcaggaga

SEQ ID NO: 790 - RNA, 19 nt, synthetic construct
  source 1..19: mol_type = other RNA
ctgctccagtgcaggagaa

SEQ ID NO: 791 - RNA, 19 nt, synthetic construct
  source 1..19: mol_type = other RNA
agtcgcatctcagtgcaga

SEQ ID NO: 792 - RNA, 19 nt, synthetic construct
  source 1..19: mol_type = other RNA
tcgcatctcagtgcaggaa

SEQ ID NO: 793 - RNA, 19 nt, synthetic construct
  source 1..19: mol_type = other RNA
cccagtcggcttcttctca

SEQ ID NO: 794 - RNA, 21 nt, synthetic construct
  source 1..21: mol_type = other RNA
ccctgcccagtcggcttcatt

SEQ ID NO: 795 - RNA, 21 nt, synthetic construct
  source 1..21: mol_type = other RNA
cctgcccagtcggcttctatt

SEQ ID NO: 796 - RNA, 21 nt, synthetic construct
  source 1..21: mol_type = other RNA
tgcccagtcggcttcttcatt

SEQ ID NO: 797 - RNA, 21 nt, synthetic construct
  source 1..21: mol_type = other RNA
gcccagtcggcttcttctatt

SEQ ID NO: 798 - RNA, 21 nt, synthetic construct
  source 1..21: mol_type = other RNA
cccagtcggcttcttctcatt

SEQ ID NO: 799 - RNA, 21 nt, synthetic construct
  source 1..21: mol_type = other RNA
ccagtcggcttcttctccatt

SEQ ID NO: 800 - RNA, 21 nt, synthetic construct
  source 1..21: mol_type = other RNA
cagtcggcttcttctccaatt

SEQ ID NO: 801 - RNA, 21 nt, synthetic construct
  source 1..21: mol_type = other RNA
gctgctccagtgcaggagatt

SEQ ID NO: 802 - RNA, 21 nt, synthetic construct
  source 1..21: mol_type = other RNA
ctgctccagtgcaggagaatt

SEQ ID NO: 803 - RNA, 21 nt, synthetic construct
  source 1..21: mol_type = other RNA
agtcgcatctcagtgcagatt

SEQ ID NO: 804 - RNA, 21 nt, synthetic construct
  source 1..21: mol_type = other RNA
tcgcatctcagtgcaggaatt

SEQ ID NO: 805 - RNA, 21 nt, synthetic construct
  source 1..21: mol_type = other RNA
agtcggcttcttctccaaatt

SEQ ID NO: 806 - RNA, 21 nt, synthetic construct
  source 1..21: mol_type = other RNA
tcatgcagtgggtggttcttt

SEQ ID NO: 807 - RNA, 21 nt, synthetic construct
  source 1..21: mol_type = other RNA
tattaggtactgtttttcttt

SEQ ID NO: 808 - RNA, 21 nt, synthetic construct
  source 1..21: mol_type = other RNA
tcagtcactcaccagtttctt

SEQ ID NO: 809 - RNA, 21 nt, synthetic construct
  source 1..21: mol_type = other RNA
tgcagtcactcaccagttttt

SEQ ID NO: 810 - RNA, 21 nt, synthetic construct
  source 1..21: mol_type = other RNA
tattccgtttcagtgaacttt

SEQ ID NO: 811 - RNA, 21 nt, synthetic construct
  source 1..21: mol_type = other RNA
tccgcaaggaaggcattcctt

SEQ ID NO: 812 - RNA, 21 nt, synthetic construct
  source 1..21: mol_type = other RNA
tttcaccgcaaggaaggcatt

SEQ ID NO: 813 - RNA, 21 nt, synthetic construct
  source 1..21: mol_type = other RNA
ttttcaccgcaaggaaggctt

SEQ ID NO: 814 - RNA, 21 nt, synthetic construct
  source 1..21: mol_type = other RNA
tctttcaccgcaaggaaggtt

SEQ ID NO: 815 - RNA, 21 nt, synthetic construct
  source 1..21: mol_type = other RNA
tgctttcaccgcaaggaagtt

SEQ ID NO: 816 - RNA, 21 nt, synthetic construct
  source 1..21: mol_type = other RNA
tcgctttcaccgcaaggaatt

SEQ ID NO: 817 - RNA, 21 nt, synthetic construct
  source 1..21: mol_type = other RNA
ttcgctttcaccgcaaggatt

SEQ ID NO: 818 - RNA, 21 nt, synthetic construct
  source 1..21: mol_type = other RNA
tttcgctttcaccgcaaggtt

SEQ ID NO: 819 - RNA, 21 nt, synthetic construct
  source 1..21: mol_type = other RNA
tattcgctttcaccgcaagtt

SEQ ID NO: 820 - RNA, 21 nt, synthetic construct
  source 1..21: mol_type = other RNA
taattcgctttcaccgcaatt

SEQ ID NO: 821 - RNA, 21 nt, synthetic construct
  source 1..21: mol_type = other RNA
tgaattcgctttcaccgcatt

SEQ ID NO: 822 - RNA, 21 nt, synthetic construct
  source 1..21: mol_type = other RNA
taggaattcgctttcaccgtt

SEQ ID NO: 823 - RNA, 21 nt, synthetic construct
  source 1..21: mol_type = other RNA
ttaggaattcgctttcacctt

SEQ ID NO: 824 - RNA, 21 nt, synthetic construct
  source 1..21: mol_type = other RNA
ttctaggaattcgctttcatt

SEQ ID NO: 825 - RNA, 21 nt, synthetic construct
  source 1..21: mol_type = other RNA
tgtctaggaattcgctttctt

SEQ ID NO: 826 - RNA, 21 nt, synthetic construct
  source 1..21: mol_type = other RNA
ttgtctaggaattcgcttttt

SEQ ID NO: 827 - RNA, 21 nt, synthetic construct
  source 1..21: mol_type = other RNA
tgtgtctaggaattcgctttt

SEQ ID NO: 828 - RNA, 21 nt, synthetic construct
  source 1..21: mol_type = other RNA
tggtgtctaggaattcgcttt

SEQ ID NO: 829 - RNA, 21 nt, synthetic construct
  source 1..21: mol_type = other RNA
ttctgttccaggtgtctagtt

SEQ ID NO: 830 - RNA, 21 nt, synthetic construct
  source 1..21: mol_type = other RNA
tgtcgcagtatttgtgctgtt

SEQ ID NO: 831 - RNA, 21 nt, synthetic construct
  source 1..21: mol_type = other RNA
tggtcgcagtatttgtgcttt

SEQ ID NO: 832 - RNA, 21 nt, synthetic construct
  source 1..21: mol_type = other RNA
tgggtcgcagtatttgtgctt

SEQ ID NO: 833 - RNA, 21 nt, synthetic construct
  source 1..21: mol_type = other RNA
ttaggttggggtcgcagtatt

SEQ ID NO: 834 - RNA, 21 nt, synthetic construct
  source 1..21: mol_type = other RNA
tctaggttggggtcgcagttt

SEQ ID NO: 835 - RNA, 21 nt, synthetic construct
  source 1..21: mol_type = other RNA
tcctaggttggggtcgcagtt

SEQ ID NO: 836 - RNA, 21 nt, synthetic construct
  source 1..21: mol_type = other RNA
taagccctaggttggggtctt

SEQ ID NO: 837 - RNA, 21 nt, synthetic construct
  source 1..21: mol_type = other RNA
tgaagccctaggttggggttt

SEQ ID NO: 838 - RNA, 21 nt, synthetic construct
  source 1..21: mol_type = other RNA
tcgaagccctaggttggggtt

SEQ ID NO: 839 - RNA, 21 nt, synthetic construct
  source 1..21: mol_type = other RNA
ttggacccgaagccctaggtt

SEQ ID NO: 840 - RNA, 21 nt, synthetic construct
  source 1..21: mol_type = other RNA
tcccttctgctggacccgatt

SEQ ID NO: 841 - RNA, 21 nt, synthetic construct
  source 1..21: mol_type = other RNA
tcgtacagtgccagccttctt

SEQ ID NO: 842 - RNA, 21 nt, synthetic construct
  source 1..21: mol_type = other RNA
tcctcactcgtacagtgcctt

SEQ ID NO: 843 - RNA, 21 nt, synthetic construct
  source 1..21: mol_type = other RNA
tcacaggcctcactcgtactt

SEQ ID NO: 844 - RNA, 21 nt, synthetic construct
  source 1..21: mol_type = other RNA
tcatgagcggtgcaggacatt

SEQ ID NO: 845 - RNA, 21 nt, synthetic construct
  source 1..21: mol_type = other RNA
tgcgagcatgagcggtgcatt

SEQ ID NO: 846 - RNA, 21 nt, synthetic construct
  source 1..21: mol_type = other RNA
tggcgagcatgagcggtgctt

SEQ ID NO: 847 - RNA, 21 nt, synthetic construct
  source 1..21: mol_type = other RNA
tccgggcgagcatgagcggtt

SEQ ID NO: 848 - RNA, 21 nt, synthetic construct
  source 1..21: mol_type = other RNA
tcttgaccccaaagccgggtt

SEQ ID NO: 849 - RNA, 21 nt, synthetic construct
  source 1..21: mol_type = other RNA
tgctcgcagatggtatcagtt

SEQ ID NO: 850 - RNA, 21 nt, synthetic construct
  source 1..21: mol_type = other RNA
tggctcgcagatggtatcatt

SEQ ID NO: 851 - RNA, 21 nt, synthetic construct
  source 1..21: mol_type = other RNA
taagaagccgactgggcagtt

SEQ ID NO: 852 - RNA, 21 nt, synthetic construct
  source 1..21: mol_type = other RNA
tttcgaaagcagatgacactt

SEQ ID NO: 853 - RNA, 21 nt, synthetic construct
  source 1..21: mol_type = other RNA
ttttcgaaagcagatgacatt

SEQ ID NO: 854 - RNA, 21 nt, synthetic construct
  source 1..21: mol_type = other RNA
ttttttcgaaagcagatgatt

SEQ ID NO: 855 - RNA, 21 nt, synthetic construct
  source 1..21: mol_type = other RNA
tagggtgacatttttcgaatt

SEQ ID NO: 856 - RNA, 21 nt, synthetic construct
  source 1..21: mol_type = other RNA
taagggtgacatttttcgatt

SEQ ID NO: 857 - RNA, 21 nt, synthetic construct
  source 1..21: mol_type = other RNA
tgtccaagggtgacatttttt

SEQ ID NO: 858 - RNA, 21 nt, synthetic construct
  source 1..21: mol_type = other RNA
tcgaagatgatggggatcatt

SEQ ID NO: 859 - RNA, 21 nt, synthetic construct
  source 1..21: mol_type = other RNA
tatcccgaagatgatggggtt

SEQ ID NO: 860 - RNA, 21 nt, synthetic construct
  source 1..21: mol_type = other RNA
taaacaggatcccgaagattt

SEQ ID NO: 861 - RNA, 21 nt, synthetic construct
  source 1..21: mol_type = other RNA
tcttattggttggcttctttt

SEQ ID NO: 862 - RNA, 21 nt, synthetic construct
  source 1..21: mol_type = other RNA
tggccttattggttggctttt

SEQ ID NO: 863 - RNA, 21 nt, synthetic construct
  source 1..21: mol_type = other RNA
tcgtcgggaaaattgatcttt

SEQ ID NO: 864 - RNA, 21 nt, synthetic construct
  source 1..21: mol_type = other RNA
ttcgtcgggaaaattgatctt

SEQ ID NO: 865 - RNA, 21 nt, synthetic construct
  source 1..21: mol_type = other RNA
tatcgtcgggaaaattgattt

SEQ ID NO: 866 - RNA, 21 nt, synthetic construct
  source 1..21: mol_type = other RNA
tgatcgtcgggaaaattgatt

SEQ ID NO: 867 - RNA, 21 nt, synthetic construct
  source 1..21: mol_type = other RNA
tgagccaggaagatcgtcgtt

SEQ ID NO: 868 - RNA, 21 nt, synthetic construct
  source 1..21: mol_type = other RNA
ttggagccaggaagatcgttt

SEQ ID NO: 869 - RNA, 21 nt, synthetic construct
  source 1..21: mol_type = other RNA
tgttggagccaggaagatctt

SEQ ID NO: 870 - RNA, 21 nt, synthetic construct
  source 1..21: mol_type = other RNA
tcatgtaaagtctcctgcatt

SEQ ID NO: 871 - RNA, 21 nt, synthetic construct
  source 1..21: mol_type = other RNA
ttccatgtaaagtctcctgtt

SEQ ID NO: 872 - RNA, 21 nt, synthetic construct
  source 1..21: mol_type = other RNA
tcatccatgtaaagtctcctt

SEQ ID NO: 873 - RNA, 21 nt, synthetic construct
  source 1..21: mol_type = other RNA
tgactctctttgccatccttt

SEQ ID NO: 874 - RNA, 21 nt, synthetic construct
  source 1..21: mol_type = other RNA
tcgactctctttgccatcctt

SEQ ID NO: 875 - RNA, 21 nt, synthetic construct
  source 1..21: mol_type = other RNA
tatgcgactctctttgccatt

SEQ ID NO: 876 - RNA, 21 nt, synthetic construct
  source 1..21: mol_type = other RNA
tgatgcgactctctttgcctt

SEQ ID NO: 877 - RNA, 21 nt, synthetic construct
  source 1..21: mol_type = other RNA
tagatgcgactctctttgctt

SEQ ID NO: 878 - RNA, 21 nt, synthetic construct
  source 1..21: mol_type = other RNA
ttgagatgcgactctcttttt

SEQ ID NO: 879 - RNA, 21 nt, synthetic construct
  source 1..21: mol_type = other RNA
tctgagatgcgactctctttt

SEQ ID NO: 880 - RNA, 21 nt, synthetic construct
  source 1..21: mol_type = other RNA
tactgagatgcgactctcttt

SEQ ID NO: 881 - RNA, 21 nt, synthetic construct
  source 1..21: mol_type = other RNA
tcactgagatgcgactctctt

SEQ ID NO: 882 - RNA, 21 nt, synthetic construct
  source 1..21: mol_type = other RNA
tgcactgagatgcgactcttt

SEQ ID NO: 883 - RNA, 21 nt, synthetic construct
  source 1..21: mol_type = other RNA
ttgcactgagatgcgactctt

SEQ ID NO: 884 - RNA, 21 nt, synthetic construct
  source 1..21: mol_type = other RNA
tcctgcactgagatgcgactt

SEQ ID NO: 885 - RNA, 21 nt, synthetic construct
  source 1..21: mol_type = other RNA
taccctcacgccacagcagtt

SEQ ID NO: 886 - RNA, 21 nt, synthetic construct
  source 1..21: mol_type = other RNA
tctatgcccagtcagtgcctt

SEQ ID NO: 887 - RNA, 21 nt, synthetic construct
  source 1..21: mol_type = other RNA
taagcggggagctatgccctt

SEQ ID NO: 888 - RNA, 21 nt, synthetic construct
  source 1..21: mol_type = other RNA
tggtgaagtgagaggttcttt

SEQ ID NO: 889 - RNA, 21 nt, synthetic construct
  source 1..21: mol_type = other RNA
tgggtgaagtgagaggttctt

SEQ ID NO: 890 - RNA, 21 nt, synthetic construct
  source 1..21: mol_type = other RNA
taatacaagttgggagacttt

SEQ ID NO: 891 - RNA, 21 nt, synthetic construct
  source 1..21: mol_type = other RNA
tggtggatattactaaacctt

SEQ ID NO: 892 - RNA, 21 nt, synthetic construct
  source 1..21: mol_type = other RNA
ttggtggatattactaaactt

SEQ ID NO: 893 - RNA, 21 nt, synthetic construct
  source 1..21: mol_type = other RNA
tctggtggatattactaaatt

SEQ ID NO: 894 - RNA, 21 nt, synthetic construct
  source 1..21: mol_type = other RNA
taggtctggtggatattactt

SEQ ID NO: 895 - RNA, 21 nt, synthetic construct
  source 1..21: mol_type = other RNA
taaggtctggtggatattatt

SEQ ID NO: 896 - RNA, 21 nt, synthetic construct
  source 1..21: mol_type = other RNA
tcgcagggaagccaccatgtt

SEQ ID NO: 897 - RNA, 21 nt, synthetic construct
  source 1..21: mol_type = other RNA
ttatggcttcctgggcgcatt

SEQ ID NO: 898 - RNA, 21 nt, synthetic construct
  source 1..21: mol_type = other RNA
ttatatggcttcctgggcgtt

SEQ ID NO: 899 - RNA, 21 nt, synthetic construct
  source 1..21: mol_type = other RNA
tgcatctgtgtatatggcttt

SEQ ID NO: 900 - RNA, 21 nt, synthetic construct
  source 1..21: mol_type = other RNA
tggcatctgtgtatatggctt

SEQ ID NO: 901 - RNA, 21 nt, synthetic construct
  source 1..21: mol_type = other RNA
tgttcactatcacaaacaatt

SEQ ID NO: 902 - RNA, 21 nt, synthetic construct
  source 1..21: mol_type = other RNA
tgacagttaagcagcttcctt

SEQ ID NO: 903 - RNA, 21 nt, synthetic construct
  source 1..21: mol_type = other RNA
tgatggacagttaagcagctt

SEQ ID NO: 904 - RNA, 21 nt, synthetic construct
  source 1..21: mol_type = other RNA
ttttagccagtctcctgcttt

SEQ ID NO: 905 - RNA, 21 nt, synthetic construct
  source 1..21: mol_type = other RNA
tatttagccagtctcctgctt

SEQ ID NO: 906 - RNA, 21 nt, synthetic construct
  source 1..21: mol_type = other RNA
ttatttagccagtctcctgtt

SEQ ID NO: 907 - RNA, 21 nt, synthetic construct
  source 1..21: mol_type = other RNA
ttttgagattctgttgtattt

SEQ ID NO: 908 - RNA, 21 nt, synthetic construct
  source 1..21: mol_type = other RNA
tcgagctgtgggttttctgtt

SEQ ID NO: 909 - RNA, 21 nt, synthetic construct
  source 1..21: mol_type = other RNA
tactcttcgagctgtgggttt

SEQ ID NO: 910 - RNA, 21 nt, synthetic construct
  source 1..21: mol_type = other RNA
tcgtcaccactcttcgagctt

SEQ ID NO: 911 - RNA, 21 nt, synthetic construct
  source 1..21: mol_type = other RNA
tgacgtcaccactcttcgatt

SEQ ID NO: 912 - RNA, 21 nt, synthetic construct
  source 1..21: mol_type = other RNA
tcagacgtcaccactcttctt

SEQ ID NO: 913 - RNA, 21 nt, synthetic construct
  source 1..21: mol_type = other RNA
tatctccctttaaccaacctt

SEQ ID NO: 914 - RNA, 21 nt, synthetic construct
  source 1..21: mol_type = other RNA
tgcattatgggaaagccaatt

SEQ ID NO: 915 - RNA, 21 nt, synthetic construct
  source 1..21: mol_type = other RNA
tgaagccgactgggcagggtt

SEQ ID NO: 916 - RNA, 21 nt, synthetic construct
  source 1..21: mol_type = other RNA
tagaagccgactgggcaggtt

SEQ ID NO: 917 - RNA, 21 nt, synthetic construct
  source 1..21: mol_type = other RNA
tgaagaagccgactgggcatt

SEQ ID NO: 918 - RNA, 21 nt, synthetic construct
  source 1..21: mol_type = other RNA
tagaagaagccgactgggctt

SEQ ID NO: 919 - RNA, 21 nt, synthetic construct
  source 1..21: mol_type = other RNA
tggagaagaagccgactggtt

SEQ ID NO: 920 - RNA, 21 nt, synthetic construct
  source 1..21: mol_type = other RNA
ttggagaagaagccgactgtt

SEQ ID NO: 921 - RNA, 21 nt, synthetic construct
  source 1..21: mol_type = other RNA
tttggagaagaagccgacttt

SEQ ID NO: 922 - RNA, 21 nt, synthetic construct
  source 1..21: mol_type = other RNA
tctcctgcactggagcagctt

SEQ ID NO: 923 - RNA, 21 nt, synthetic construct
  source 1..21: mol_type = other RNA
ttctcctgcactggagcagtt

SEQ ID NO: 924 - RNA, 21 nt, synthetic construct
  source 1..21: mol_type = other RNA
tctgcactgagatgcgacttt

SEQ ID NO: 925 - RNA, 21 nt, synthetic construct
  source 1..21: mol_type = other RNA
ttcctgcactgagatgcgatt

SEQ ID NO: 926 - RNA, 21 nt, synthetic construct
  source 1..21: mol_type = other RNA
tgagaagaagccgactgggtt

SEQ ID NO: 927 - RNA, 21 nt, synthetic construct
  source 1..21: mol_type = other RNA
tgaagccgactgggcagggtt

SEQ ID NO: 928 - RNA, 21 nt, synthetic construct
  source 1..21: mol_type = other RNA
tagaagccgactgggcaggtt

SEQ ID NO: 929 - RNA, 21 nt, synthetic construct
  source 1..21: mol_type = other RNA
tgaagaagccgactgggcatt

SEQ ID NO: 930 - RNA, 21 nt, synthetic construct
  source 1..21: mol_type = other RNA
tagaagaagccgactgggctt

SEQ ID NO: 931 - RNA, 21 nt, synthetic construct
  source 1..21: mol_type = other RNA
tgagaagaagccgactgggtt

SEQ ID NO: 932 - RNA, 21 nt, synthetic construct
  source 1..21: mol_type = other RNA
tggagaagaagccgactggtt

SEQ ID NO: 933 - RNA, 21 nt, synthetic construct
  source 1..21: mol_type = other RNA
ttggagaagaagccgactgtt

SEQ ID NO: 934 - RNA, 21 nt, synthetic construct
  source 1..21: mol_type = other RNA
tctcctgcactggagcagctt

SEQ ID NO: 935 - RNA, 21 nt, synthetic construct
  source 1..21: mol_type = other RNA
ttctcctgcactggagcagtt

SEQ ID NO: 936 - RNA, 21 nt, synthetic construct
  source 1..21: mol_type = other RNA
tctgcactgagatgcgacttt

SEQ ID NO: 937 - RNA, 21 nt, synthetic construct
  source 1..21: mol_type = other RNA
ttcctgcactgagatgcgatt

SEQ ID NO: 938 - RNA, 21 nt, synthetic construct
  source 1..21: mol_type = other RNA
tttggagaagaagccgacttt

SEQ ID NO: 939 - RNA, 19 nt, synthetic construct
  source 1..19: mol_type = other RNA
gagtcgcatctcagtgcaa

SEQ ID NO: 940 - RNA, 19 nt, synthetic construct
  source 1..19: mol_type = other RNA
gtcgcatctcagtgcagga

SEQ ID NO: 941 - RNA, 19 nt, synthetic construct
  source 1..19: mol_type = other RNA
agaacctctcacttcacca

SEQ ID NO: 942 - RNA, 19 nt, synthetic construct
  source 1..19: mol_type = other RNA
gaacctctcacttcaccca

SEQ ID NO: 943 - RNA, 19 nt, synthetic construct
  source 1..19: mol_type = other RNA
agtctcccaacttgtatta

SEQ ID NO: 944 - RNA, 19 nt, synthetic construct
  source 1..19: mol_type = other RNA
ggaagctgcttaactgtca

SEQ ID NO: 945 - RNA, 19 nt, synthetic construct
  source 1..19: mol_type = other RNA
gcaggagactggctaaata

SEQ ID NO: 946 - RNA, 19 nt, synthetic construct
  source 1..19: mol_type = other RNA
ttatcctttggtttcttga

SEQ ID NO: 947 - RNA, 21 nt, synthetic construct
  source 1..21: mol_type = other RNA
gtgtgttacgtgcagtgaatt

SEQ ID NO: 948 - RNA, 19 nt, synthetic construct
  source 1..19: mol_type = other RNA
tgttccactgggctgagaa

SEQ ID NO: 949 - RNA, 21 nt, synthetic construct
  source 1..21: mol_type = other RNA
gcgaattcctagacacctatt

SEQ ID NO: 950 - RNA, 21 nt, synthetic construct
  source 1..21: mol_type = other RNA
gtgtgttacgtgcagtgacta

SEQ ID NO: 951 - RNA, 21 nt, synthetic construct
  source 1..21: mol_type = other RNA
actacaagactcgtgaccatt

SEQ ID NO: 952 - RNA, 21 nt, synthetic construct
  source 1..21: mol_type = other RNA
gtgtgttacgtgcagtgaatt

SEQ ID NO: 953 - RNA, 21 nt, synthetic construct
  source 1..21: mol_type = other RNA
gcgaattcctagacacctatt

SEQ ID NO: 954 - RNA, 21 nt, synthetic construct
  source 1..21: mol_type = other RNA
gtgtgttacgtgcagtgacta

SEQ ID NO: 955 - RNA, 19 nt, synthetic construct
  source 1..19: mol_type = other RNA
tccttgcggtgaaagcgaa

SEQ ID NO: 956 - RNA, 19 nt, synthetic construct
  source 1..19: mol_type = other RNA
gtaatatccaccagaccta

SEQ ID NO: 957 - RNA, 19 nt, synthetic construct
  source 1..19: mol_type = other RNA
ttgtttgtgatagtgaaca

SEQ ID NO: 958 - RNA, 19 nt, synthetic construct
  source 1..19: mol_type = other RNA
gctgcttaactgtccatca

SEQ ID NO: 959 - RNA, 21 nt, synthetic construct
  source 1..21: mol_type = other RNA
ttgcactgagatgcgactctt

SEQ ID NO: 960 - RNA, 21 nt, synthetic construct
  source 1..21: mol_type = other RNA
tcctgcactgagatgcgactt

SEQ ID NO: 961 - RNA, 21 nt, synthetic construct
  source 1..21: mol_type = other RNA
tggtgaagtgagaggttcttt

SEQ ID NO: 962 - RNA, 21 nt, synthetic construct
  source 1..21: mol_type = other RNA
tgggtgaagtgagaggttctt

SEQ ID NO: 963 - RNA, 21 nt, synthetic construct
  source 1..21: mol_type = other RNA
taatacaagttgggagacttt

SEQ ID NO: 964 - RNA, 21 nt, synthetic construct
  source 1..21: mol_type = other RNA
tgacagttaagcagcttcctt

SEQ ID NO: 965 - RNA, 21 nt, synthetic construct
  source 1..21: mol_type = other RNA
tatttagccagtctcctgctt

SEQ ID NO: 966 - RNA, 21 nt, synthetic construct
  source 1..21: mol_type = other RNA
tcaagaaaccaaaggataatt

SEQ ID NO: 967 - RNA, 21 nt, synthetic construct
  source 1..21: mol_type = other RNA
ttcactgcacgtaacacactg

SEQ ID NO: 968 - RNA, 21 nt, synthetic construct
  source 1..21: mol_type = other RNA
ttctcagcccagtggaacatt

SEQ ID NO: 969 - RNA, 21 nt, synthetic construct
  source 1..21: mol_type = other RNA
taggtgtctcggaattcgctt

SEQ ID NO: 970 - RNA, 23 nt, synthetic construct
  source 1..23: mol_type = other RNA
tagtcactgcacgtaacacactg

SEQ ID NO: 971 - RNA, 21 nt, synthetic construct
  source 1..21: mol_type = other RNA
tggtcacgagtcttgtagttt

SEQ ID NO: 972 - RNA, 21 nt, synthetic construct
  source 1..21: mol_type = other RNA
ttcactgcacgtaacacactg

SEQ ID NO: 973 - RNA, 21 nt, synthetic construct
  source 1..21: mol_type = other RNA
taggtgtctcggaattcgctt

SEQ ID NO: 974 - RNA, 23 nt, synthetic construct
  source 1..23: mol_type = other RNA
tagtcactgcacgtaacacactg

SEQ ID NO: 975 - RNA, 21 nt, synthetic construct
  source 1..21: mol_type = other RNA
ttcgctttcaccgcaaggatt

SEQ ID NO: 976 - RNA, 21 nt, synthetic construct
  source 1..21: mol_type = other RNA
taggtctggtggatattactt

SEQ ID NO: 977 - RNA, 21 nt, synthetic construct
  source 1..21: mol_type = other RNA
tgttcactatcacaaacaatt

SEQ ID NO: 978 - RNA, 21 nt, synthetic construct
  source 1..21: mol_type = other RNA
tgatggacagttaagcagctt

SEQ ID NO: 979 - RNA, 1682 nt, Homo sapiens
  source 1..1682: mol_type = mRNA
agtggtcctgccgcctggtctcacctcgctatggttcgtctgcctctgcagtgcgtcctctggggctgcttgctgaccgctgtccatccagaaccacccactgcatgcagagaaaaacagtacctaataaacagtcagtgctgttctttgtgccagccaggacagaaactggtgagtgactgcacagagttcactgaaacggaatgccttccttgcggtgaaagcgaattcctagacacctggaacagagagacacactgccaccagcacaaatactgcgaccccaacctagggcttcgggtccagcagaagggcacctcagaaacagacaccatctgcacctgtgaagaaggctggcactgtacgagtgaggcctgtgagagctgtgtcctgcaccgctcatgctcgcccggctttggggtcaagcagattgctacaggggtttctgataccatctgcgagccctgcccagtcggcttcttctccaatgtgtcatctgctttcgaaaaatgtcacccttggacaagctgtgagaccaaagacctggttgtgcaacaggcaggcacaaacaagactgatgttgtctgtggtccccaggatcggctgagagccctggtggtgatccccatcatcttcgggatcctgtttgccatcctcttggtgctggtctttatcaaaaaggtggccaagaagccaaccaataaggccccccaccccaagcaggaaccccaggagatcaattttcccgacgatcttcctggctccaacactgctgctccagtgcaggagactttacatggatgccaaccggtcacccaggaggatggcaaagagagtcgcatctcagtgcaggagagacagtgaggctgcacccacccaggagtgtggccacgtgggcaaacaggcagttggccagagagcctggtgctgctgctgctgtggcgtgagggtgaggggctggcactgactgggcatagctccccgcttctgcctgcacccctgcagtttgagacaggagacctggcactggatgcagaaacagttcaccttgaagaacctctcacttcaccctggagcccatccagtctcccaacttgtattaaagacagaggcagaagtttggtggtggtggtgttggggtatggtttagtaatatccaccagaccttccgatccagcagtttggtgcccagagaggcatcatggtggcttccctgcgcccaggaagccatatacacagatgcccattgcagcattgtttgtgatagtgaacaactggaagctgcttaactgtccatcagcaggagactggctaaataaaattagaatatatttatacaacagaatctcaaaaacactgttgagtaaggaaaaaaaggcatgctgctgaatgatgggtatggaactttttaaaaaagtacatgcttttatgtatgtatattgcctatggatatatgtataaatacaatatgcatcatatattgatataacaagggttctggaagggtacacagaaaacccacagctcgaagagtggtgacgtctggggtggggaagaagggtctgggggagggttggttaaagggagatttggctttcccataatgcttcatcatttttcccaaaaggagagtgaattcacataatgcttatgtaattaaaaaatcatcaaacatgtaaaaa

SEQ ID NO: 980-1394 - skipped (415 entries)

SEQ ID NO: 1395 - protein, 90 aa, synthetic construct
MLPAPKNLVVSRVTEDSARLSWTAPDAAFDSFYIAYAEPRPDGEAILLLVPGSERSYDLTGLKPGTEYSVLIHGVKGGLLSSPLVASFTT

SEQ ID NO: 1396 - protein, 90 aa, synthetic construct
MLPAPKNLVVSRVTEDSARLSWTAPDAAFDSFGIGYWERRWYGEAIVLTVPGSERSYDLTGLKPGTEYEVTIRGVKGGGYSGPLSAIFTT

SEQ ID NO: 1397 - protein, 90 aa, synthetic construct
MLPAPKNLVVSRVTEDSARLSWTAPDAAFDSFDIGYTEYGGYGEAIILQVPGSERSYDLTGLKPGTEYWVLIQGVKGGGSSVPLVAYFTT

SEQ ID NO: 1398 - protein, 90 aa, synthetic construct
MLPAPKNLVVSRVTEDSARLSWTAPDAAFDSFYIAYAEPRPDGEAIILGVPGSERSYDLTGLKPGTEYSVLIHGVKGGLLSSPLSAYSTT

SEQ ID NO: 1399 - protein, 90 aa, synthetic construct
MLPAPKNLVVSRVTEDSARLSWTAPDAAFDSFFIGYLEPQPPGEAIHLIVPGSERSYDLTGQKPGTEYNVTIQGVKGGFPSDPLVASFTT

SEQ ID NO: 1400 - protein, 90 aa, synthetic construct
MLPAPKNLVVSRVTEDSARLSWTAPDAAFDSFHIVYHEPRPSGEAIWLWVPGSERSYDLTGLKPGTEYEVGIVSVKGGDLSVPLSAIFTT

SEQ ID NO: 1401 - protein, 90 aa, synthetic construct
MLPAPKNLVVSRVTEDSARLSWTAPDAVFDSFYIAYAEPRPDGEAIGLYVPGSERSYDLTGLKPGTEYSVLIHGVKGGLLSSPLTASFTT

SEQ ID NO: 1402 - protein, 90 aa, synthetic construct
MLPAPKNLVVSRVTEDSARLSWTAPDAAFDSFFIGYLEPQPPGEAIGLQVPGSERSYDLTGLKPGTEYNVTIQGVKGGFPSMPLSAIFTT

SEQ ID NO: 1403 - protein, 90 aa, synthetic construct
MLPAPKNLVVSRVTEDSARLSWTAPDAAFDSFYIAYAEPRPDGEAILLQVPGSERSYDLTGLKPGTEYSVLIHGVKGGLLSSPLVAKFTT

SEQ ID NO: 1404 - protein, 90 aa, synthetic construct
MLPAPKNLVVSRVTEDSARLSWTAPDAAFDSFFIGYLEPQPPGEAIILHVPGSERSYDLTGLKPGTEYNVTIQGVKGGFPSLPLNANFTT

SEQ ID NO: 1405 - protein, 90 aa, synthetic construct
MLPAPKNLVVSRVTEDSARLSWTAPDAAFDSFHIVYHEPRPSGEAIYLEVPGSERSYDLTGLKPGTEYEVGIVSVKGGDLSVPLRAHFTT

SEQ ID NO: 1406 - protein, 90 aa, synthetic construct
MLPAPKNLVVSRVTEDSARLSWTAPDAAFDSFFIGYLEPQPPGEAISLWVPGSERSYDLTGLKPGTEYNVTIQGVKGGFPSIPLWAIFTT

SEQ ID NO: 1407 - protein, 90 aa, synthetic construct
MLPAPKNLVVSRVTEDSARLSWTAPDAAFDSFFIGYLEPQPPGEAIDLWVPGSERSYDLTGLKPGTEYNVTIQGVKGGFPSMPLSAIFTT

SEQ ID NO: 1408 - protein, 90 aa, synthetic construct
MLPAPKNLVVSRVTEDSARLSWTAPDAAFDSFFIGYLEPQPPGEAIYLLVPGSERSYDLTGLKPGTEYNVTIQGVKGGFPSDPLSAIFTT

SEQ ID NO: 1409 - protein, 90 aa, synthetic construct
MLPAPKNLVVSRVTEDSARLSWTAPDAAFDSFHIVYHEPRPSGEAIWLFVPGSERSYDLTGLKPGTEYEVGIVSVKGGDLSVPLSAIFTT

SEQ ID NO: 1410 - protein, 90 aa, synthetic construct
MLPAPKNLVVSRVTEDSARLSWTAPDAAFDSFFIGYLEPQPPGEAIDLYVPGSERSYDLTGLKPGIEYNVTIQGVKGGFPSLPLQAHFTT

SEQ ID NO: 1411 - protein, 90 aa, synthetic construct
MLPAPKNLVVSRVTEDSARLSWTAPDAAFDSFYIAYAEPRPDGEAILLLVPGSERSYDLTGLKPGTEYSVLIHGVKGGLLSSPLIAGFTT

SEQ ID NO: 1412 - protein, 90 aa, synthetic construct
MLPAPKNLVVSRVTEDSARLSWTAPDAAFDSFFIGYLEPQPPGEAIWLLVPGSERSYDLTGLKPGTEYNVTIQGVKGGFPSTPLSAIFTT

SEQ ID NO: 1413 - protein, 90 aa, synthetic construct
MLPAPKNLVVSRVTEDSARLSWTAPDAAFDSFYIAYAEPRPDGEAITLWVPGSERSYDLTGLKPGTEYSVTIHGVKGGLLSSPLSAIFTT

SEQ ID NO: 1414 - protein, 91 aa, synthetic construct
MSLPAPKNLVVSRVTEDSARLSWTAPDAAFDSFFIGYLEPQPPGEAIELYVPGSERSYDLTGLKPGTEYNVTIQGVKGGFPSDPLVAFFTT

SEQ ID NO: 1415 - protein, 91 aa, synthetic construct
MSLPAPKNLVVSRVTEDSARLSWTAPDAAFDSFEIAYQELSLWGEAIVLTVPGSERSYDLTGLKPGTEYWVQIGGVKGGEWSAPLSAIFTT

SEQ ID NO: 1416 - protein, 91 aa, synthetic construct
MSLPAPKNLVVSRVTEDSARLSWTAPDAAFDSFFIGYLEPQPPGEAITLYVPGSERSYDLTGLKPGTEYNVTIQGVKGGFPSAPLSAIFTT

SEQ ID NO: 1417 - protein, 91 aa, synthetic construct
MSLPAPKNLVVSRVTEDSARPSWTAPDAAFDSFEIGYFENLYLGEAIVLTVPGSERSYDLTGLKPGTEYYVHIGGVKGGIWSSPLSAYFTT

SEQ ID NO: 1418 - protein, 91 aa, synthetic construct
MSLPAPKNLVVSRVTEDSARLSWTAPDAAFDSFAIRYWELRATGEAIPLSVPGSERSYDLTGLKPGTEYHVAISGVKGGKSSYPLRASFTT

SEQ ID NO: 1419 - protein, 91 aa, synthetic construct
MSLPAPKNLVVSRVIEDSARLSWTAPDAAFDSFEIGYFENLYLGEAIVLTVPGSERSYDLTGLKPGTEYWVQIGGVKGGNWSAPLSAIFTT

SEQ ID NO: 1420 - protein, 91 aa, synthetic construct
MSLPAPKNLVVSRVTEDSARLSWTAPDAAFDSFYIAYAEPRPDGEAIILLVPGSERSYDLTGLKPGTEYSVLIHGVKGGLLSSPLHAHFTT

SEQ ID NO: 1421 - protein, 91 aa, synthetic construct
MSLPAPKNLVVSRVTEDSARLSWTAPDAVFDSFEIAYQELSLWGEAIVLTVPGSERSYDLTGLKPGTEYYVHIGGVKGGIWSSPLSAYFTT

SEQ ID NO: 1422 - protein, 91 aa, synthetic construct
MSLPAPKNLVVSRVTEDSARLSWTAPDAAFDSFFIGYLEPQPPGEAITLLVPGSERSYDLTGLKPGTEYNVTIQGVKGGFPSGPLQASFTT

SEQ ID NO: 1423 - protein, 92 aa, synthetic construct
MSSLPAPKNLVVSRVTEDSARLSWTAPDAAFDSFEIGYFENLYLGEAIVLTVPGSERSYDLTGLKPGTEYWVQIGGVKGGNWSAPLSAIFTT

SEQ ID NO: 1424 - protein, 93 aa, synthetic construct
MGGSLPAPKNLVVSRVTEDSARLSWTAPDAAFDSFEIGYFENLYLGEAIVLTVPGSERSYDLTGLKPGTEYWVQIGGVKGGNWSAPLSAIFTT

SEQ ID NO: 1425 - protein, 91 aa, synthetic construct
MSLPAPKNLVVSRVTEDSARLSWTAPDAAFDSFEIAYFERTWFGEAIVLTVPGSERSYDLTGLKPGTEYWVQIGGVKGGDWSAPLSAIFTT

SEQ ID NO: 1426 - protein, 91 aa, synthetic construct
MSLPAPKNLVVSRVTEDSARLSWTAPDAAFDSFEIAYFENDWAGEAIVLTVPGSERSYDLTGLKPGTEYVVFIGGVKGGDFSPPLSAIFTT

SEQ ID NO: 1427 - protein, 91 aa, synthetic construct
MSLPAPKNLVVSRVTEDSARLSWTAPDAAFDSFEIGYFENLYLGEAIVLTVPGSERSYDLTGLKPGTEYWVQIGGVKGVNWSAPLSAIFTT

SEQ ID NO: 1428 - protein, 91 aa, synthetic construct
MSLPAPKNLVVSRVTEDSARLSWTAPDAAFDSFKIKYAEYDRYGEAIALFVPGSERSYDLTGLKPGTEYFVHIDGVKGGTDSQPLVASFTT

SEQ ID NO: 1429 - protein, 91 aa, synthetic construct
MSLPAPKNLVVSRVTEDSARLSWTAPDAAFDSFDINYWENESGGEAIALFVPGSERSYDLTGLKPGTEYLVTIAGVKGGWWSKPLYATFTT

SEQ ID NO: 1430 - protein, 91 aa, synthetic construct
MSLPAPKNLVVSRVTEDSARLSWTAPDAAFDSFFIGYLEPQSPGEAIALYVPGSERSYDLTGLKPGTEYNVTIQGVKGGFPSEPLIANFTT

SEQ ID NO: 1431 - protein, 91 aa, synthetic construct
MSLPAPKNLVVSRVTEDSARLSWTAPDAAFDSFEIDYVEFIFTGEAIGLIVPGSERSYDLTGLKPGTEYWVTIAGVKGGEWSTPLQAFLTT

SEQ ID NO: 1432 - protein, 91 aa, synthetic construct
MSLPAPKNLVVSRVTEDSARLSWTAPDAAFDSFFIGYLEPQPPGEAITLYVPGSERSYDLTGLKPGTEYNVTIQGVKGGFPSDPLVAHFTT

SEQ ID NO: 1433 - protein, 91 aa, synthetic construct
MSLPAPKNLVVSRVTEDSARLSWTAPDAAFDSFFIGYLEPQPPGEVIHLFVPGSERSYDLTGLKPGTEYNVTIQGVKGGFPSMPLSAIFTT

SEQ ID NO: 1434 - protein, 91 aa, synthetic construct
MSLPAPKNLVVSRVTEDSARLSWTAPDAAFDSFEIGYFENLYLGEAIVLTVPGSERSYDLTGLKPGTEYWVQIGGVKGGAYSTPLSAIFTT

SEQ ID NO: 1435 - protein, 91 aa, synthetic construct
MSLPAPKNLVVSRVTEDSARLSWTAPDAAFDSFFIGYLEPQPPGEAIHLYVPGSERSYDLTGLKPGTEYNVTIQGVKGGFPSMPLSAIFTT

SEQ ID NO: 1436 - protein, 91 aa, synthetic construct
MSLPAPKNLVVSRVTEDSARLSWTAPDAAFDSFEIGYFENLYLGEAIVLTVPGSERSYDLTGLKPGTEYWVQIGGVKGGNWSAPLSAYFTT

SEQ ID NO: 1437 - protein, 91 aa, synthetic construct
MSLPAPKNLVVSRVTEDSARLSWTASDAAFDSFHIWYFEKANEGEAIPLVVPGSERSYDLTGLKPGTEYDVDIGGVKGGAWSIPLGARFTT

SEQ ID NO: 1438 - protein, 91 aa, synthetic construct
MSLPAPKNLVVSRVTEDSARLSWTAPDAAFDSFAIQYVEVIGSGEAIELIVPGSERSYDLTGLKPGTEYHVYIDGVKGGKDSKPLYAGFTT

SEQ ID NO: 1439 - protein, 91 aa, synthetic construct
MSLPAPKNLVVSRVTEDSARLSWTAPDAAFDSFEIGYFENLYLGEAIVLTVPGSERSYDLTSLKPGTEYWVQIGGVKGGNWSAPLSATFTT

SEQ ID NO: 1440 - protein, 91 aa, synthetic construct
MSLPAPKNLVVSRVTEDSARLSWTAPDAAFDSFFIGYLEPQPPGEAIALLVPGSERSYDLTGLKPGTEYNVTIQGVKGGFPSHPLSAKFTT

SEQ ID NO: 1441 - protein, 91 aa, synthetic construct
MSLPAPKNLVVSRVTEDSARLSWTAPDAAFDSFDIGYFENTYEGEAIVLTVPGSERSYDLTGLKPGTEYVVWIGGVKGGSYSSPLSAIFTT

SEQ ID NO: 1442 - protein, 91 aa, synthetic construct
MSLPAPKNLVVSRVTEDSARLSWTAPDAAFDSFFIGYLEPQPPGEAIELFVPGSERSYDLTGLKPGTEYNVTIQGVKGGFPSGPLIASFTT

SEQ ID NO: 1443 - protein, 91 aa, synthetic construct
MSLPAPKNLVVSRVTEDSARLSWTAPDAAFDSFEIVYQENSAYGEAIVLTVPGSERSYDLTGLKPGTEYWVQIGGVKGGEWSAPLSAIFTT

SEQ ID NO: 1444 - protein, 91 aa, synthetic construct
MSLPAPKNLVVSRVTEDSARLSWTAPDAAFDSFDIGYFELRYYGEAIVLTVPGSERSYDLTGLKPGTEYWVSIGGVKGGTYSAPLSAIFTT

SEQ ID NO: 1445 - protein, 91 aa, synthetic construct
MSLPAPKNLVVSRVTEDSARLSWTAPDAAFDSFDIGYFENSYAGEAIVLTVPGSERSYDLTGLKPGTEYYVSIAGVKGGRFSPPLSAIFTT

SEQ ID NO: 1446 - protein, 91 aa, synthetic construct
MSLPAPKNLVVSRITEDSARLSWTAPDAAFDSFEIAYFETCRTGEAIVLTVPGSERSYDLTGLKPGTEYRVWIGGVKGGVWSRPLSAIVTT

SEQ ID NO: 1447 - protein, 91 aa, synthetic construct
MSLPAPKNLVVSRVTEDSARLSWTAPDAAFDSFDIGYFEATYYGEAIVLTVPGSERSYDLTGLKPGTEYWVQIGGVKGGNWSAPLSAIFTT

SEQ ID NO: 1448 - protein, 91 aa, synthetic construct
MSLPAPKNLVVSRVTEDSARLSWTAPDAAFDSFYIAYAEPRPDGEAIVLAVPGSERSYDLTGLKPGTEYSVLIHGVKGGLLSSPLGADFTT

SEQ ID NO: 1449 - protein, 91 aa, synthetic construct
MSLPAPKNLVVSRVTEDSARLSWTAPDAAFDSFEIGYFENLYLGEAIVLTVPGSERSYDLTGLKPGTEYWVQIGGVKGGNWSAPLSAIFTT

SEQ ID NO: 1450 - protein, 91 aa, synthetic construct
MSLPAPENLVVSRVTEDSARLSWTAPDAAFDSFEIGYFENLYLGEAIVLTVPGSERSYDLTGLKPGTEYWVQIGGVKGGVWSRPLSAIFTT

SEQ ID NO: 1451 - protein, 91 aa, synthetic construct
MSLPAPKNLVVSRVTEDSARLSWTAPDAAFDSFEIGYFEMSWTGEAIVLTVPGSERSYDLTGLKPGTEYVVFIGGVKGGNWSAPLSAIFTT

SEQ ID NO: 1452 - protein, 91 aa, synthetic construct
MSLPAPKNLVVSRVTEDSARLSWTAPDAAFDSFEIGYGEFTYYGEAIVLTVPGSERSYDLTGLKPGTEYWVQIGGVKGGNWSNPLSAIFTT

SEQ ID NO: 1453 - protein, 91 aa, synthetic construct
MSLPAPKNLVVSRVTEDSARLSWTAPDAAFDSFEIAYFERTWFGEAIVLTVPGSERSYDLTGLKPGTEYWVQIGGVKGGDWSKPLSAIFTT

SEQ ID NO: 1454 - protein, 91 aa, synthetic construct
MSLPAPKNLVVSRVTEDSARLSWTAPDAAFDSFEIVYQENSAYGEAIVLTVPGSERSYDLTGLKPGTEYWVQIGGVKGGNWSAPLSAISTT

SEQ ID NO: 1455 - protein, 91 aa, synthetic construct
MSLPAPKNLVVSRVTEDSARLSWTAPDAAFDSFEIGYFENLYLGEAIVLTVPGSERSYDLTGLKPGTEYWVQIGGVKGGNWSVPLSAIFTT

SEQ ID NO: 1456 - protein, 91 aa, synthetic construct
MSLPAPKNLVVSRVTEDSARLSWTAPDAAFDSFFIGYLEPQPPGEAIVLTVPGSERSYDLTGLKPGTEYNVTIQGVKGGFPSEPLVAHFTT

SEQ ID NO: 1457 - protein, 91 aa, synthetic construct
MSLPAPKNLVVSRVTEDSARLSWTALDAAFDSFEISYWEHTFNGEAIILFVPGSERSYDLTGLKPGTEYYVTIGGVKGGAWSPPLWAEFTT

SEQ ID NO: 1458 - protein, 91 aa, synthetic construct
MSLPAPKNLVVSRVTEDSARLSWTAPDAAFDSFFIGYLEPQPPGEVIHLYVPGSERSYDLTGLKPGTEYVVFIGGVKGGVWSVPLSAIFTT

SEQ ID NO: 1459 - protein, 91 aa, synthetic construct
MSLPAPKNLVVSRVTEDSARLSWTAPDAAFDSFFIGYLEPQPPGEAIHLYVPGSERSYDLTGLKPGTEYWVQIGGVKGGNWSAPLSAIFTT

SEQ ID NO: 1460 - protein, 91 aa, synthetic construct
MSLPAPKNLVVSRVTEDSARLSWTAPDAAFDSFYIAYAEPRPDGEAILLEVPGSERSYDLAGLKPGTEYSVLIHGVKGGLLSSPLGAEFTT

SEQ ID NO: 1461 - protein, 91 aa, synthetic construct
MSLPAPKNLVVSRVTEDSARLSWTAPDAAFDSFEIGYFENLYLGEAIVLTVPGSERSYDLTGLKPGTEYWVQIGGIKGGNWSAPLSAIFTT

SEQ ID NO: 1462 - protein, 91 aa, synthetic construct
MSLPAPKNLVVSRVTEDSARLSWTAPDAAFDSFFIGYLEPQPPGEAIVLTVPGSERSYDLTGLKPGTEYNVTIQGVKGGFPSVPLSAAFTT

SEQ ID NO: 1463 - protein, 91 aa, synthetic construct
MSLPAPKNLVVSRVTEDSARLSWTAPDAAFDSFIIGYLEPQPPDEAIALYVPGSERSYDLTGLKPGTEYNVTIQGVKGGFPSLPLVATFTT

SEQ ID NO: 1464 - protein, 91 aa, synthetic construct
MSLPAPKNLVVSRVTEDSARLSWTAPDAAFDSFEIGYFENLYLGEAIVLTVPGSERSYDLTGLKPGTEYWVQIGGVKGGNWSAPLSATFTT

SEQ ID NO: 1465 - protein, 91 aa, synthetic construct
MSLPAPKNLVVSRVTEDSARLSWTAPDAAFDSFEIGYFENLYLGEAIVLTVPGSERSYDLTGLKPGTEYWVQIGGVKGGNWSTPLSAIFTT

SEQ ID NO: 1466 - protein, 91 aa, synthetic construct
MSLPAPKNLVVSRVTEDSARLSWTAPDAAFDSFEIGYFENLYLGEAIVLTVPGSERSYDLTGLKPGTEYWVQIGGVKGGEWSSPLSAIFTT

SEQ ID NO: 1467 - protein, 91 aa, synthetic construct
MSRPAPKNLVVSRVTEDSARLSWTAPGAAFDSFEIAYFERTWFGEAIVLTVPSSERSYDLTGLKPGTEYWVQIGGVKGGDWSKPLSAIFTT

SEQ ID NO: 1468 - protein, 91 aa, synthetic construct
MSLPAPKNLVVSRVTEDSARLSWTAPDAAFDSFEIAYQELSLWGEAIVLTVPGSERSYDLTGLKPGTEYYVHIGGVKGGIWSSPLVAHFTT

SEQ ID NO: 1469 - protein, 91 aa, synthetic construct
MSLPAPKNLVVSRVTEDSARLSWTAPNAAFDSFEIGYFENLYLGEAIVLTVPGSERSYDLTGLKPGTEYWVQIGGVKGGNWSAPLSAIFTT

SEQ ID NO: 1470 - protein, 91 aa, synthetic construct
MSLPAPKNLVVSRVTEDSARLSWTAPDAAFDSFEIAYQELSLWGEAIVLTVPGSERSYDLTGLKPGTEYVVFIGGVKGGVWSVPLSAIFTT

SEQ ID NO: 1471 - protein, 91 aa, synthetic construct
MSLPAPKNLVVSRVTEDSARLSWTAPDAAFDSFFIGYLEPQPPGEAIHLFVPGSERSYDLTGLKPGTEYWVQIGGVKGGNWSAPLSAIFTT

SEQ ID NO: 1472 - protein, 91 aa, synthetic construct
MSLPAPKNLVVSRVTEDSARLSWTAPDAAFDSFEIGYFENLYLGEAIVLTVPGSERSYDLTSLKPGTEYWVQIGGVKGGNWSAPLSAIFTT

SEQ ID NO: 1473 - protein, 92 aa, synthetic construct
MGSLPAPKNLVVSRVTEDSARLSWTAPDAAFDSFFIGYLEPQPPGEAISLYVPGSERSYDLTGLKPGTEYNVTIQGVKGGFPSDPLVAHFTT

SEQ ID NO: 1474 - protein, 91 aa, synthetic construct
MSLPAPKNLVVSRVTEDSARLSWTAPDAAFDSFFIGYLEPQPPGEAITLLVPGSERSYDLTGLKPGTEYNVTIQGVKGGFPSHPLVATTTT

SEQ ID NO: 1475 - protein, 91 aa, synthetic construct
MSLPAPKNLVVSRVTEDSARLSWTAPDAAFDSFFIGYLEPQPPGEAISLYVPGSERSYDLTGLKPGTEYNVTIQGVKGGFPSEPLIANFTT

SEQ ID NO: 1476 - protein, 91 aa, synthetic construct
MSLPAPKNLVVSRVTEDSARLSWTAPDAAFDSFEIGYFENDYFGEAIVLTVPGSERSYDLTGLKPGTEYWVQIGGVKGGNWSAPLSAIFTT

SEQ ID NO: 1477 - protein, 91 aa, synthetic construct
MSLPAPENLVVSRVTEDSARLSWTAPDAAFDSFEIGYWENAYKGEAIVLTVPGSERSYDLTGLKPGTEYVVFIGGVKGGVWSVPLSVIFTT

SEQ ID NO: 1478 - protein, 91 aa, synthetic construct
MSLPAPKNLVISRVTEDSARLSWTAPDAAFDSFEIVYAEPVRFGEAIVLTVPGSERSYDLTGLKPGTEYWVQIGGVKGGEWSSPLSAIFTT

SEQ ID NO: 1479 - protein, 91 aa, synthetic construct
MSLPAPKNLVVSRVTEDSARPSWTAPDAAFDSFEIAYFERTWFGEAIVLTVPGSERSYDLTGLKPGTEYWVQIGGVKGGDWSKPLSAIFTT

SEQ ID NO: 1480 - protein, 92 aa, synthetic construct
MGSLPAPKNLVVSRVTEDSARLSWTAPDAAFDSFEISYWEHTFNGEAIILFVPGSERSYDLTGLKPGTEYWVQIGGVKGGNWSAPLSAIFTT

SEQ ID NO: 1481 - protein, 91 aa, synthetic construct
MSLPAPKNLVVSRVTEDSARLSWTAPDAAFDSFEIGYFENPYLGEAIVLTVPGSERSYDLTGLKPGTEYWVQIGGVKGGNWSAPLSAIFTT

SEQ ID NO: 1482 - protein, 91 aa, synthetic construct
MSLPAPKNLVVSRVTEDSARLSWTAPDAAFDSFEIGYWENAYKGEAIVLTVPGSERSYDLTGLKPGTEYRVWIGGVKGGVWSRPLSAIFTT

SEQ ID NO: 1483 - protein, 91 aa, synthetic construct
MSLPAPKNLVVSRVTEDSARLSWTAPDAAFDSFEIGYWENAYKGEAIVLTVPGSERSYDLTGLKPGTEYVVFIGGVKGGHGSQPLSAIFTT

SEQ ID NO: 1484 - protein, 91 aa, synthetic construct
MSLPAPKNLVVSRVTEDSARLSWTAPDAAFDSFEIGYFEHTYYGEAIVLTVPGSERSYDLTGLKPGTEYWVQIGGVKGGNWSAPLSAIFTT

SEQ ID NO: 1485 - protein, 91 aa, synthetic construct
MSLPAPKNLVISRVTEDSARLSWTAPDAAFDSFEIGYFENLYLGEAIVLTVPGSERSYDLTGLKPGTEYWVQIGGVKGGNWSAPLSAISTT

SEQ ID NO: 1486 - protein, 91 aa, synthetic construct
MSLPAPKNLVVSRVTEDSARLSWTAPDAAFDSFEIGYFENLYLGEAIVLTVPGSERSYDLAGLKPGTEYWVQIGGVKGGNWSAPLSAIFTT

SEQ ID NO: 1487 - protein, 91 aa, synthetic construct
MSLPAPKNLVVSRVTEDSARLSWTAPDAAFDSFEIGYFENLYLGEAIVLTVPGSERSYDLTGLKPGTEYWVQIGGVKGGWGSNPLSAIFTT

SEQ ID NO: 1488 - protein, 91 aa, synthetic construct
MSLPAPKNLVVSRVTEDSARLSWTAPDAAFDSFEIGYFENLYLGEAIVLTVPGSERSYDLTGLKPGTEYWVQIGGVKGGNWSEPLSAIFTT

SEQ ID NO: 1489 - protein, 91 aa, synthetic construct
MSLPAPKNLVVSRVTEDSARLSWTAPDAAFDSFEIGYFENLYLGEAIVLTVPGSERSYDLTGLKPGTEYPVWIGGVKGGTWSVPLSTIFTT

SEQ ID NO: 1490 - protein, 91 aa, synthetic construct
MSLPAPKNLIVSRVTEDSARLSWTAPDAAFDSFEIGYFENLYLGEAIVLTVPGSERSYDLTGLKPGTEYWVQIGGVKGSNWSAPLSAIFTT

SEQ ID NO: 1491 - protein, 91 aa, synthetic construct; identical to SEQ ID NO: 1449

SEQ ID NO: 1492 - protein, 91 aa, synthetic construct
MSLPAPKNLVVSRVTEDSARLSWTAPDAAFDSFFIGYLEPQPPGEAISLLVPGSERSYDLTGLKPGTEYNVTIQGVKGGFPSEPLHAIFTT

SEQ ID NO: 1493 - protein, 91 aa, synthetic construct
MSLPAPKNLVVSRVTEDSARLSWTAPDAAFDSFLIGYTEYSVYGEAIVLTVPGSERSYDLTGLKPGTEYTVWIMGVKGGIKSTPLSAISTT

SEQ ID NO: 1494 - protein, 91 aa, synthetic construct
MSLPAPKNLVVSRVTEDSARLSWTAPDAAFDSFEIGYFENLYLGEAIVLTVPGYERSYDLTGLKPGTEYWVQIGGVKGGNWSAPLSAIFTT

SEQ ID NO: 1495 - protein, 91 aa, synthetic construct
MSLPAPKNLVVSRVTEDSARLSWTAPDAAFDSFEIGYFENLYLGEAIVLTVPGSERSYDLTGLKPGTEYWVQIGGVKGSNWSAPLSAIFTT

SEQ ID NO: 1496 - protein, 91 aa, synthetic construct
MSLPAPKNLVVSRVTEDSARLSWTAPDAAFDSFEIAYFEGTFHGEAIVLFVPGSERSYDLTGLKPGTEYAVWIGGVKGGDYSRPLSAAFTT

SEQ ID NO: 1497 - protein, 91 aa, synthetic construct
MSLPAPKNLVVSRVTEDSARLSWTAPDAAFDSFEIGYFENLYLGEAIVLTVPGSERSYDLTGLKPGTEYYVHIGGVKGGIWSSPLSAIFTT

SEQ ID NO: 1498 - protein, 91 aa, synthetic construct
MSLPAPKNLVVSRVTEDFARLSWTAPDAAFDSFEIAYWEQSYTGEAIVLTVPGSERSYDLTGLKPGTEYFVHIGGVKGGVWSTPLSAIFTT

SEQ ID NO: 1499 - protein, 91 aa, synthetic construct
MSLPAPKNLVVSRVTEDSARLSWTAPDAAFDSFLIQYDEWPTYGEAIVLTVPGSERSYDLTGLKPGTEYLVEIVGVKGGNLSGPLSAIFTT

SEQ ID NO: 1500 - protein, 91 aa, synthetic construct
MSLPAPKNLVVSRVTEDSARLSWTAPDAAFDSFEIGYFENLYLGEAIHLFVPGSERSYDLTGLKPGTEYNVTIQGVKGGFPSEPLIANFTT

SEQ ID NO: 1501 - protein, 91 aa, synthetic construct
MSLPAPKNLVASRVTEDSARLSWTAPDAAFDSFEIGYFENLYLGEAIVLTVPGSERSYDLTGLKPGTEYWVQIGGVKGGNWSAPLSAIFTT

SEQ ID NO: 1502 - protein, 91 aa, synthetic construct
MSLPAPKNLVVSRVTEDSARLSWTAPDAAFDSFEIGYWENAYKGEAIVLTVPGSERSYDLTGLKPGTEYVVFIGGVKGGVWSVPLSAISTT

SEQ ID NO: 1503 - protein, 91 aa, synthetic construct
MSLPAPKNLVVSRVTEDSARLSWTAPDAAFDSFFIGYFENLYLGEAIVLTVPGSERSYDLTGLKPGTEYWVQIGGVKGGNWSAPLSAIFTT

SEQ ID NO: 1504 - protein, 91 aa, synthetic construct
MSLPAPKNLVVSRVTEDSARLSWTAPDAAFDSFEIAYFERTWFGEAIVLTVPGSERSYDLTGLKPGTEYWVQIGGVKGGDWSRPLSAIFTT

SEQ ID NO: 1505 - skipped

SEQ ID NO: 1506 - protein, 91 aa, synthetic construct
MSLPAPKNLVVSRVTEDSARLSWTAPDAAFDSFEIVYAEPVRFGEAIVLTVPGSERSYDLTGLKPGTEYWVQIGGVKGGEWSSLLSAIFTT

SEQ ID NO: 1507 - protein, 91 aa, synthetic construct
MSLPAPKNLVVSRVTEDSARLSWTAPDAAFDSFEIGYFENLYLGEAIVLTVPGSERYYDLTGLKPGTEYWVQIGGVKGGNWSAPLSAIFTT

SEQ ID NO: 1508 - protein, 91 aa, synthetic construct
MSLPAPKNLVVSRVTEDSARLSWTAPDAAFDSFEIGYFENLYLGEAIVLTVPGSERSYDLTGLKPGTEYWVQIGGAKGGNWSAPLSAIFTT

SEQ ID NO: 1509 - protein, 91 aa, synthetic construct
MSLPAPKNLVVSRVTEDSARLSWTAPDAAFDSFEIDYGEYSQAGEAIGLLVPGSERSYDLTGLKPGTEYWVQIGGVKGGNWSAPLSAIFTT

SEQ ID NO: 1510 - protein, 91 aa, synthetic construct
MSLPAPKNLVVSRVTEDSARLSWTAPDAAFDSLEIGYFENLYLGEAIVLTVPGSERSYDLTGLKPGTEYWVQIGGVKGGNWSAPLSAIFTT

SEQ ID NO: 1511 - protein, 91 aa, synthetic construct
MSLPAPKNLVVSRVTEDSARLSWTAPDAAFDSFEIAYFEQTYTGEAIVLTVPGSERSYDLTGLKPGTEYWVQIGGVKGGTWSAPLSAISTT

SEQ ID NO: 1512 - protein, 91 aa, synthetic construct
MSLPAPKNLVVSRVTEDSARLSWTAPDAAFDSFEIAYFEQTYTGEAIVLTVPGSERSYDLTGLKPGTEYWVAIGGVKGGLWSLPLSAIFTT

SEQ ID NO: 1513 - protein, 91 aa, synthetic construct
MSLPAPKNLVVSRVTEDSARLSWTAPDAAFDSFEIAYHEDDFYGEAIALLVPGSERSYDLTGLKPGTEYIVHIGGVKGGFFSSPLYAWFTT

SEQ ID NO: 1514 - protein, 91 aa, synthetic construct
MSLPAPKNLVVSRVTEDSARLSWTAPDAAFDSFAIMYGERGNPGEAIVLTVPGSERSYDLTGLKPGTEYAVWIYGVKGGNYSYPLSAIFTT

SEQ ID NO: 1515 - protein, 91 aa, synthetic construct
MSLPAPKNLVVSRVTEDSARLSWTAPDAAFDSFEIAYWEQSYTGEAIVLTVPGSERSYDLTGLKPGTEYWVQIGGVKGGNWSAPLSAIFTT

SEQ ID NO: 1516 - protein, 91 aa, synthetic construct
MSLPAPKNLVVSRVTEDSARLSWTAPDAAFDSFFIGYLEPRPPGEAIHLYVPGSERSYDLTGLKPGTEYNITIQGVKGGFPSIPLIASFTT

SEQ ID NO: 1517 - protein, 91 aa, synthetic construct
MSLPAPKNLVVSRVTEDSARLSWTAPDAAFDSFFIGYLEPQPPGEAITLYVPGSERSYDLTGLKPGTEYNVTIQGVKGGFPSGPLIASFTT

SEQ ID NO: 1518 - protein, 91 aa, synthetic construct
MSLPAPKNLVVSRVTEDSARLSWTAPDAAFDSFEIAYFERTWFGEAIVLTVPGSERSYDLTGLKPGTEYWVAIGGVKGGLWSLPLSVIFTT

SEQ ID NO: 1519 - protein, 91 aa, synthetic construct
MSLPAPKNLVVSRVTEDSARLSWTAPDAAFDSFEIGYWENAYKGEAIVLTVPGSERSYDLTGLKPGTEYVVFIGGVKGGGWSGPLSAIFTT

SEQ ID NO: 1520 - protein, 91 aa, synthetic construct; identical to SEQ ID NO: 1449

SEQ ID NO: 1521 - protein, 91 aa, synthetic construct
MSLPAPKNLVISRVTEDSARLSWTAPDAAFDSFEIGYFENLYLGEAIVLTVPGSERSYDLTGLKPGTEYWVAIGGVKGGLWSLPLSAIFTT

SEQ ID NO: 1522 - protein, 90 aa, synthetic construct
MSLPAPKNLVVSRVTEDSARLSWTAPDAAFDSFEIAYAELSTGEAIVLTVPGSERSYDLTGLKPGTEYYVHIGGVKGGSWSIPLSAIFTT

SEQ ID NO: 1523 - protein, 91 aa, synthetic construct
MSLPAPKNLVVSRVTEDSARLSWTAPDAAFDSFEIGYWENAYKGEAIVLTVPGSERSYDLTGLKPGTEYVVFIGGVKGGVWSKPLSVIFTT

SEQ ID NO: 1524 - protein, 91 aa, synthetic construct
MSLPAPKNLVVSRVTEDSARLSWTAPDAAFDSFSIMYAEQKVNGEAIVLTVPGSERSYDLTGLKPGTEYLVLIWGVKGGGRSLPLSAIFTT

SEQ ID NO: 1525 - protein, 91 aa, synthetic construct
MSLPAPKNLIVSRVTEDSARLSWTAPDAAFDSLEIGYFENLYLGEAIVLTVPGSERSYDLTGLKPGTEYWVQIGGVKGGNWSAPLSAIFTT

SEQ ID NO: 1526 - protein, 91 aa, synthetic construct
MSLPAPKNLVVSRVTEDSARLSWTAPDAAFDSFFIGYLEPQPPGEAIHLFVPGSERSYDLTGLKPGTEYNVTIQGVKGGFPSEPLIANSTT

SEQ ID NO: 1527 - protein, 91 aa, synthetic construct
MSLPAPKNLVVSRVTEDSARLSWTAPDAAFDSFEISYWEHTFNGEAIILFVPGSERSYDLTGLKPGTEYVVFIGGVKGGVWSVPLSAIFTT

SEQ ID NO: 1528 - protein, 91 aa, synthetic construct
MSLPAPKNLVVSRVTEDSARLSWTAPDAAFDSFFIGYLEPQPPGEAIHLSVPGSERSYDLTGLKPGTEYWVQIGGVKGGNWSAPLSAIFTT

SEQ ID NO: 1529 - protein, 91 aa, synthetic construct
MSLPAPKNLVVSRVTEDSARLSWTAPDAAFDSFFIGYLEPQPPGEAIALYVPGSERSYDLTGLKPGTEYNVTIQGVKGGFPSEPLVAHFTT

SEQ ID NO: 1530 - protein, 91 aa, synthetic construct
MSLPAPKNLVVSRVTEDSARLSWTAPDAAFDSFEIVYAEPVRFGEAIVLTVPGSERSYDLTGLKPGTEYWVQIGGVKGGNWSAPLSAIFTT

SEQ ID NO: 1531 - protein, 91 aa, synthetic construct
MSLPAPKNLVVSRVTEDSARLSWTEPDAAFDSFEIGYFENLYLGEAIVLTVPGSERSYDLTGLKPGTEYWVQIGGVKGGNWSAPLSAIFTT

SEQ ID NO: 1532 - protein, 91 aa, synthetic construct; identical to SEQ ID NO: 1453

SEQ ID NO: 1533 - protein, 91 aa, synthetic construct
MSLPAPKNLVVSRVTEDSARLSWTAPDAAFDSFEIGYFENDYFGEAIVLTVPGSERSYDLTGLKPGTEYVVFIGGVKGGKWSAPLSAIFTT

SEQ ID NO: 1534 - protein, 91 aa, synthetic construct
MSLPAPKNLVVSRVTEDSARLSWTAPDAAFDSFEIVYQENSAYGEAIVLTVPGSERSYDLTGLKPGTEYWVQIGGVKGGNWSAPLSAIFTT

SEQ ID NO: 1535 - protein, 91 aa, synthetic construct
MSLPAPKNLVVSRVTEDSARLSWTAPDAAFDSFHIWYFEKANEGEAIPLVVPGSERSYDLTGLKPGTEYDVDIGGVKGGAWSIPLGARFTT

SEQ ID NO: 1536 - protein, 91 aa, synthetic construct
MSLPAPKNLVVSRVTEDSARLSWTAPDAAFDSFMIAYDEFIVWGEAVVLTVPGSERSYDLTGLKPGTEYLVEILGVKGGTISGPLSAIFTT

SEQ ID NO: 1537 - protein, 91 aa, synthetic construct
MSLPAPKNLVVSRVTEDSARLSWTAPDAAFDSFEIGYFENLYLGEAIVLTVPGSERSYDLTGLKPGTKYWVQIGGVKGGNWSAPLSAIFTT

SEQ ID NO: 1538 - protein, 91 aa, synthetic construct
MSLPAPKNLVVSRVTEDSARLSWTAPDAAFDSFFIGYLEPQPPGEAIHLYVPGSERSYDLTGLKPGTEYNVTIQGVKGGEWSAPLSAIFTT

SEQ ID NO: 1539 - protein, 91 aa, synthetic construct
MSLPAPKNLVVSRVTEDSARLSWTAPDAAFDSFEIGYFENLYLGEAIVLTVPGSERSYDLTGLKPGTEYVVFIGGVKGGEYSIPLSAIFTT

SEQ ID NO: 1540 - protein, 91 aa, synthetic construct
MSLPAPKNLVVSRVTEDSARLSWTAPDAAFDSFEISYWEHTFNGEAIILFVPGSERSYDLTGLKPGTEYYVTIGGVKGGAWSPPLWAHFTT

SEQ ID NO: 1541 - protein, 91 aa, synthetic construct
MSLPAPKNLVVSRVTEDSARLSWTAPDAAFDSFEIAYQELSLWGEAIVLTVPGSERSYDLTGLKPGTEYYVHIGGVKGGIWSSPLSAYFTT

SEQ ID NO: 1542 - protein, 91 aa, synthetic construct
MSLPAPKNLVVSRVTEDSARLSWTAPDAAFDSFEIGYFENLYLGEAIVLTVPGSERSYDLTGLKPGTEYWVQIGGVKGGEWSAPLSAIFTT

SEQ ID NO: 1543 - protein, 91 aa, synthetic construct
MSLPAPKNLVVSRVTEDSARLSWTAPDAAFDSFEIGYFENLYLGEAIVLTVPGSERSYDLTGLKPGTEYVVFIGGVKGGDFSPPLSAIFTT

SEQ ID NO: 1544 - protein, 91 aa, synthetic construct
MSLPAPKNLVVSRVTEDSARLSWTAPDAAFDSFEIGYWENAYRGEAIVLTVPGSERSYDLTGLKPGTEYVVFIGGVKGGVWSVPLSAIFTT

SEQ ID NO: 1545 - protein, 91 aa, synthetic construct
MSLPAPKNLVVSRVTEDSARLSWTAPDAAFDSFEIGYFENLYLGEAIVLTVPGSERSYDLTGLKPGTEYWVQIGGVNGGNWSAPLSAIFTT

SEQ ID NO: 1546 - protein, 91 aa, synthetic construct
MSLPAPKNLVVSRVTEDSARLSWTAPDAAFDSFEIGYFENLYLGEAIVLTVPGSERSYDLTGLKPGTEYWVQIGGVKGGNWSAPLVATFTT

SEQ ID NO: 1547 - protein, 91 aa, synthetic construct; identical to SEQ ID NO: 1449

SEQ ID NO: 1548 - protein, 91 aa, synthetic construct
MSLPAPKNLVVSRVTEDSARLSWTAPDAAFDSFDINYWENESGGEAIALFVPGSERSYDLTGLKPGTEYWVSIGGVKGGRFSEPLYARFTT

SEQ ID NO: 1549 - protein, 91 aa, synthetic construct
MSLPAPKNLVVSRVTEDSARLSWTAPDAAFDSFEIGYFENLYLGEAIVLWVPGSERSYDLTGLKPGTEYWVQIGGVKGGNWSAPLSAIFTT

SEQ ID NO: 1550 - protein, 91 aa, synthetic construct
MSLPAPKNLVVSRVTEDSARLSWTTPDAAFDSFEIAYFEIAWLGEAIVLTVPGSERSYDLTGLKPGTEYWVQIGGVKGGAYSTPLSAIFTT

SEQ ID NO: 1551 - protein, 91 aa, synthetic construct
MSLPVPKNLVVSRVTEDSARLSWTAPDAAFDSFEIGYFENLYLGEAIVLTVPGSERSYDLTGLKPGTEYWVQIGGVKGGNWSAPLSAIFTT

SEQ ID NO: 1552 - protein, 91 aa, synthetic construct
MSLPAPKNLVVSHVTEDSARLSWTAPDAAFDSFEIGYWENAYKGEAIVLTVPGSERSYDLTGLKPGTEYVVFIGGVKGGVWSVPLSAIFTT

SEQ ID NO: 1553 - protein, 91 aa, synthetic construct
MSLPAPKNLVVSRVTEDSARLSWTAPDAAFDSFFIGYLEPQPPGEAIVLGVPGSERSYDLTGLKPGTEYNVTIQGVKGGFPSDPLVASFTT

SEQ ID NO: 1554 - protein, 91 aa, synthetic construct
MSLPAPKNLVVSRVTEDSARLSWTAPDAAFDSFYIAYAEPRPDGEAILLEVPGSERSYDLTGLKPGTEYSVLIHGVKGGLLSSPLSATFTT

SEQ ID NO: 1555 - protein, 91 aa, synthetic construct
MSLPAPKNLVVSRITEDSARLSWTAPDAAFDSFEIGYFENLYLGEAIVLTVPGSERSYDLTGLKPGTEYWVQIGGVKGGNWSAPLSAIFTT

SEQ ID NO: 1556 - protein, 91 aa, synthetic construct
MSLPAPKNLVVSRVTEDSARLSWTAPDAAFDSFYIAYAEPRPDGEAILLWVPGSERSYDLTGLKPGTEYSVLIHGVKGGLLSSPLHAYFTT

SEQ ID NO: 1557 - protein, 91 aa, synthetic construct
MSLPAPKNLVVSRVTEDSARLSWTAPDAAFDSFFIGYLEPQPPGEVIHLFVPGSERSYDLTGLKPGTEYNVTIQGVKGGFPSDPLVASFTT

SEQ ID NO: 1558 - protein, 91 aa, synthetic construct
MSLPAPKNLVVSRVTEDSARLSWTAPDAAFDSFEIGYFENLYLGEAIVLTVPGSERSYDLTGLKPGTEYWVQIGGVKGGNWSSPLSAIFTT

SEQ ID NO: 1559 - protein, 91 aa, synthetic construct
MSLPAPKNLVVSRVTEDSARLSWTAPDAAFDSFFIGYLEPQPPGEAIALYVPGSERSYDLTGLKPGTEYNVTIQGVKGGFPSEPLVVHFTT

SEQ ID NO: 1560 - protein, 91 aa, synthetic construct
MSLPAPKNLVVSRVTEDSARLSWTAPDAAFDSFFIGYLEPQPPGEAISLYVPGSERSYDLTGLKPGTEYNVTIQGVKGGFPSDPLVAHFTT

SEQ ID NO: 1561 - protein, 91 aa, synthetic construct
MSLPAPKNLVVSRVTEDSARLSWTAPDAAFDSFFIGYLEPQPPGEAIYLLVPGSERSYDLTGLKPGTEYNVTIQGVKGGFPSLPLVATFTT

SEQ ID NO: 1562 - protein, 91 aa, synthetic construct
MSLPAPKNLVVSRVTEDSARLSWTAPDAAFDSFEISYWEHTFNGEAIILFVPGSERSYDLTGLKPGTEYYVTIGGVKGGAWSPPLWAEFTT

SEQ ID NO: 1563 - protein, 91 aa, synthetic construct
MSLPAPKNLVVSRVTEDSARLSWTAPDAAFDSFEIGYFENLYLGEAIVLTVPGSERSYDPTGLKPGTEYWVQIGGVKGGNWSAPLSAIFTT

SEQ ID NO: 1564 - protein, 91 aa, synthetic construct
MSLPAPKNLVVSRVTEDSARLSWTAPDAAFDSFEIGYFENDYFGEAIVLTVPGSERSYDLTGLKPGTEYVVFIGGVKGGNWSAPLSAIFTT

SEQ ID NO: 1565 - protein, 91 aa, synthetic construct
MSLPAPKNLVVSRVTEDSARLSWTAPDAAFDSFFIGYLEPQPPGEAIHLYVPGSERSYDLTGLKPGTEYNVTIQGVKGGFPSEPLIANSTT

SEQ ID NO: 1566 - protein, 91 aa, synthetic construct
MSLPAPKNLVVSRITEDSARLSWTAPDAAFDSFEIGYWENAYKGEAIVLTVPGSERSYDLTGLKPGTEYVVFIGGVKGGVWSVPLSAIFTT

SEQ ID NO: 1567 - protein, 91 aa, synthetic construct
MSLPAPKNLVVSRVTEDSARLSWTAPDAAFDSFEIAYGEAAYDGEAIALLVPGSERSYDLTGLKPGTEYWVQIGGVKGGNWSAPLSAIFTT

SEQ ID NO: 1568 - protein, 90 aa, synthetic construct
MLPAPKNLVVSRVTEDSARLSWTAPDAAFDSFEISYWEHTFNGEAIILFVPGSERSYDLTGLKPGTEYYVTIGGVKGGAWSPPLWAEFTT

SEQ ID NO: 1569 - protein, 91 aa, synthetic construct
MSLPAPKNLVVSRVTEDSARLSWTAPDAAFDSFEIVYWEQVGVGEAIVLTVPGSERSYDLTGLKPGTEYWVQIGGVKGGGFSEPLSAIFTT

SEQ ID NO: 1570 - protein, 91 aa, synthetic construct
MSLPAPKNLVVSRVTEDSARLSWTAPDAAFDSFEIGYFENLYLGEAIVLTVPGSERSYDLTGLKPGTEYWVQIGGVKGGNWSAPLVAEFTT

SEQ ID NO: 1571 - protein, 91 aa, synthetic construct
MSLPAPKNLVVSRVTEDSARLSWTAPDAAFDSFEIAYFELDYVGEAIVLTVPGSERSYDLTGLKPGTEYWVQIGGVKGGTWSGPLSAIFTI

SEQ ID NO: 1572 - protein, 91 aa, synthetic construct
MSLPAPKNLVVSRVTEDSARLSWTAPDAAFDSFEIGYFELTYYGEAIVLTVPGSERSYDLTGLKPGTEYWVQIGGVKGGGFSEPLSAIFTT

SEQ ID NO: 1573 - protein, 91 aa, synthetic construct
MSLPAPKNLVVSRVTEDSARLSWTAPDAAFDSFEIGYFENLYLGEAIVLTVPGSERSHDLTGLKPGTEYWVQIGGVKGGNWSAPLSAIFTT

SEQ ID NO: 1574 - protein, 91 aa, synthetic construct
MSLPAPKNLVVSRVTEDSARLSWTAPDAAFDSFFIGYLEPQPPGEAIHLYVPGSERSYDLTGLKPGTEYNVTIQGVKGGNWSAPLSAIFTT

SEQ ID NO: 1575 - protein, 91 aa, synthetic construct
MSLPAPKNLVVSRVTEDSARLSWTALDAAFDSFEIGYFENLYLGEAIVLTVPGSERSYDLTGLKPGTEYWVQIGGVKGGNWSAPLSAIFTT

SEQ ID NO: 1576 - protein, 91 aa, synthetic construct
MSLPAPKNLVVSRVTEDSARLSWTAPDAAFDSFFIGYLEPQPPGEAIALYVPGSERSYDLTGLKPGTEYNVTIQGVKGGFPSEPLIANFTT

SEQ ID NO: 1577 - protein, 91 aa, synthetic construct
MSLPAPKNLVVSRVTEDSARLSWTAPDAAFDSFDIGYFELTWYGEAIVLTVPGSERSYDLTGLKPGTEYWVSIGGVKGGRFSEPLYARFTT

SEQ ID NO: 1578 - protein, 91 aa, synthetic construct
MSLPAPKNLVVSRVTEDSARLSWTAPDAAFDSFEIAYQELSLWGEAIVLTVPGSERSYDLTGLKPGTEYYVHIGGVKGGIWSSPLSAYSTT

SEQ ID NO: 1579 - protein, 91 aa, synthetic construct
MSLPAPKNLVVSRVTEDSARLSWTAPDAAFDSFEIGYWENAYKGEAIVLTVPGSERSYDLTGLKPGTEYMVFIGGVKGGVWSVPLSAIFTT

SEQ ID NO: 1580 - protein, 91 aa, synthetic construct
MSLPAPKNLVVSRVTEDSARLSWTATDAAFDSFEIGYWENAYKGEAIVLTVPGSERSYDLTGLKPGTEYVVFIGGVKGGVWSVPLSAIFTT

SEQ ID NO: 1581 - protein, 91 aa, synthetic construct
MSLPAPKNLVVSRVTEDSARLSWTAPDAAFDSFEIVYAEPVRFGEAIVLTVPGSERSYDLTGLKPGTEYWVQIGGVKGGEWSSPLSAIFTT

SEQ ID NO: 1582 - protein, 91 aa, synthetic construct; identical to SEQ ID NO: 1449

SEQ ID NO: 1583 - protein, 91 aa, synthetic construct; identical to SEQ ID NO: 1555

SEQ ID NO: 1584 - protein, 91 aa, synthetic construct
MSLPAPKNLVVSRVTEDSARLSWTAPDAAFDSFEIAYFEIAWLGEAIVLTVPGSERSYDLTGLKPGTEYWVQIGGVKGGAYSTPLSAIFTT

SEQ ID NO: 1585 - protein, 91 aa, synthetic construct
MSLPAPKNLVVSRVTEDSARLSWTAPDAAFDSFFIGYLEPQPPGEAIHLYVPGSERSYDLTGLKPGTEYNVTIQGVKGGFPSEPLVATFTT

SEQ ID NO: 1586 - protein, 91 aa, synthetic construct; identical to SEQ ID NO: 1555

SEQ ID NO: 1587 - protein, 91 aa, synthetic construct
MSLPAPKNLVVSRVTEDSARLSWTAPDAAFDSFEIGYWENAYKGEAIVLTVPGSERSYDLTGLKPGTEYVVFIGGVKGGVWSVSLSAIFTT

SEQ ID NO: 1588 - protein, 91 aa, synthetic construct
MSLPAPKNLVVSRVTEDSARLSWTAPDAAFDSFFIGYLEPQPPGEAIDLYVPGSERSYDLTGLKPGTEYNVTIQGVKGGFPSHPLVATFTT

SEQ ID NO: 1589 - protein, 91 aa, synthetic construct
MSLPAPKNLVVSRVTEDSARLSWTAPDAAFDSFFIGYLEPQPLGEAIHLFVPGSERSYDLTGLKPGTEYNVTIQGVKGGFPSEPLIASFTT

SEQ ID NO: 1590 - protein, 91 aa, synthetic construct
MSLPAPKNLVVSRVTEDSARLSWTAPDAAFDSFFIGYLEPQPPGEAIDLYVPGSERSYDLTGLKPGTEYNVTIQGVKGGFPSEPLVATFTT

SEQ ID NO: 1591 - protein, 91 aa, synthetic construct
MSLPAPKNLVVSRVTEDSARLSWTAPDAAFDSFDIGYFELTWYGEAIVLTVPGSERSYDLTGLKPGTEYWVSIGGVKGGIWSSPLSAIFTT

SEQ ID NO: 1592 - protein, 91 aa, synthetic construct
MSLPAPKNLVVSRVTEDSARLSWTAPDAAFDSFEISYFENTWYGEAIVLTVPGSERSYDLTGLKPGTEYSVRIFGVKGGNFSFPLSAIFTT

SEQ ID NO: 1593 - protein, 91 aa, synthetic construct
MSLPAPKNLVVSRVTEDSARLSWTAPDAAFDSFEIGYFENLYLGEAIVLTVPGSERSYDLTGLKPGTEYWVQIGGVKGDNWSAPLSAIFTT

SEQ ID NO: 1594 - protein, 91 aa, synthetic construct
MSLPAPKNLVVSRVTEDSARLSWTAPDAAFDSFEIAYFENLYLGEAIVLTVPGSERSYDLTGLKPGTEYWVQIGGVKGGNWSAPLSAIFTT

SEQ ID NO: 1595 - protein, 91 aa, synthetic construct
MSLPAPKNLVVSRVTEDSARLSWTAPDAAFDSFEIGYFEATPNGEAIVLTVPGSERSYDLTGLKPGTEYKVFIGGVKGGRWSKPLSAIFTT

SEQ ID NO: 1596 - protein, 91 aa, synthetic construct
MSLPAPKNLVVSRVTEDSARLSWTTPDAAFDSFEIGYFENLYLGEAIVLTVPGSERSYDLTGLKPGTEYWVQIGGVKGGNWSAPLSAIFTT

SEQ ID NO: 1597 - skipped

SEQ ID NO: 1598 - protein, 91 aa, synthetic construct
MSLPAPKNLVVSRVTEDSARLSWTAPDAAFDSFWIEYWEGWKSGEAIVLTVPGSERSYDLTGLKPGTEYRVHIWGVKGGIVSWPLSAIFTT

SEQ ID NO: 1599 - protein, 91 aa, synthetic construct
MSLPAPKNLVVSRVTEDSARLSWTAPDAAFDSFEIGYFENLYLGEAIVLTVPGSERSYDLTGLKPGTEYVVFIGGVKGGVWSVPLSAIFTT

SEQ ID NO: 1600 - protein, 91 aa, synthetic construct
MSLPAPKNLVVSRVTEDSARLSWTAPDAAFDSFEIAYFEQTYTGEAIVLTVPGSERSYDLTGLKPGTEYWVQIGGVKGGNWSAPLSAIFTT

SEQ ID NO: 1601 - protein, 91 aa, synthetic construct
MSLPAPKNLVVSRVTEDSARLSWTAPDAAFDSFEIGHFENLYLGEAIVLTVPGSERSYDLTGLKPGIEYWVQIGGVKGGVWSVSLSAIFTT

SEQ ID NO: 1602 - protein, 91 aa, synthetic construct
MSLPAPKNLVVSRVTEDSARLSWTAPDAAFNSFEIGYFENLYLGEAIVLTVPGSERSYDLTGLKPGTEYWVQIGGVKGGTFSAPLSAIFTT

SEQ ID NO: 1603 - protein, 91 aa, synthetic construct
MSLPAPKNLVVSRVTEDSARMSWTTPDAAFDSFEIGYFENLYLGEAIVLTVPGSERSYDLTGLKPGTEYWVQIGGVKGGNWSAPLSAIFTT

SEQ ID NO: 1604 - protein, 91 aa, synthetic construct
MSLPAPENLVVSRVTEDSARLSWTAPDAAFDSFEIGYFENLYLGEAIVLTVPGSERSYDLTGLKPGTEYWVQIGGVKGGNWSAPLSAIFTT

SEQ ID NO: 1605 - protein, 91 aa, synthetic construct
MSLPAPKNLVVSRVTEDSARLSWTAPDAAFDSFEIDYGEYSQAGEAIGLLVPGSERSYDLTGLKPGTEYAVWIGGVKGGFFSTPLEADFTT

SEQ ID NO: 1606 - protein, 91 aa, synthetic construct
MSLPAPKNLVVSRVTEDSARLSWTAPDAAFDSFEIGYWENAYKGEAIVLTVPGSERSYDLTGLKPGTEYVVFIGGVKGGSWSNPLSAIFTT

SEQ ID NO: 1607 - protein, 91 aa, synthetic construct
MSLPAPKNLVVSRVTEDSARLSWTAPDAAFDSFEIGYFENLYLGEAIVLTIPGSERSYDLTGLKPGTEYWVQIGGVKGGNWSAPLSAIFTT

SEQ ID NO: 1608 - protein, 91 aa, synthetic construct
MSLPAPKNLVVSRVTEDSARLSWTAPDAAFDSFEIAYFENDWAGEAIVLTIPGSERSYDLTGLKPGTEYWVQIGGVKGGNWSAPLSAIFTT

SEQ ID NO: 1609 - protein, 92 aa, synthetic construct
MGSLPAPKNLVVSRVTEDSARLSWTAPDAAFDSFEIGYFENLYLGEAIVLTVPGSERSYDLTGLKPGTEYWVQIGGVKGGNWSAPLSAIFTT

SEQ ID NO: 1610 - protein, 91 aa, synthetic construct
MSLPAPKNLVVSRVTEDSARLSWTAPDAAFDSFEIGYFENLYLGEAIVLTVPGSERSYDLTGLKPGTEYWVQIGGVKGGNWSAPLSAISTT

SEQ ID NO: 1611 - protein, 91 aa, synthetic construct
MSLPAPKNLVISRVTEDSARLSWTAPDAAFDSFEIGYFENLYLGEAIVLTVPGSERSYDLTGLKPGTEYWVQIGGVKGGNWSAPLSAIFTT

SEQ ID NO: 1612 - protein, 91 aa, synthetic construct; identical to SEQ ID NO: 1449

SEQ ID NO: 1613 - skipped

SEQ ID NO: 1614 - protein, 91 aa, synthetic construct
MSLPAPKNLVVSRVTEDSARLSWTAPGAAFDSFEIGYFENLYLGEAIVLTVPGSERSYDLTGLKPGTEYWVQIGGVKGGVWSVPLSAIFTT

SEQ ID NO: 1615 - protein, 91 aa, synthetic construct
MSLPVPKNLVVSRVTEDSARLSWTAPDAAFDSFEIGYWENAYKGEAIVLTVPGSERSYDLTGLKPGTEYWVQIGGVKGGNWSAPLSAIFTT

SEQ ID NO: 1616 - protein, 91 aa, synthetic construct; identical to SEQ ID NO: 1449

SEQ ID NO: 1617 - protein, 91 aa, synthetic construct
MSLPAPKNLVVSRVTEDSARLSWTAPDAAFDSFEIGYFEITRYGEAIILFVPGSERSYDLTGLKPGTEYWVQIGGVKGGNWSAPLSAIFTT

SEQ ID NO: 1618 - protein, 91 aa, synthetic construct
MSLPAPKNLVVSRVTEDSARLSWTAPDAAFDSFEIGYFENLYLGEAIVLTVPGSERSYDLTGLKPGTEYWVQIGGVKGGNWSGPLSAIFTT

SEQ ID NO: 1619 - protein, 91 aa, synthetic construct
MSLPAPKNLVVSRITEDSARLSWTAPDAAFDSFEIGYFENLYLGEAIVLTVPGSERSYDLTGLKPGTEYWVQIGGVKGGNWSAPLSAISTT

SEQ ID NO: 1620 - protein, 91 aa, synthetic construct
MSLPAPKNLVVSRVTEDSARLSWTAPDAAFDSFEIGYFENLYLGEAIVLTVPGSERSYDLTGLKPGTEYWVQIGGVKGGNWSAPLSEIFTT

SEQ ID NO: 1621 - protein, 91 aa, synthetic construct
MSLPAPKNLVVSRVTEDSARLSWTAPDAAFDSFEIGYWENAYKGEAIVLTVPGSERSYDLTGLKPGTEYWVQIGGVKGGVWSTPLSAIFTT

SEQ ID NO: 1622 - protein, 91 aa, synthetic construct
MSLPAPKNLVVSRVTEDSARLSWTAPDAAFDSFEIGYWENAYKGEAIVLTVPGSERSYDLTGLKPGTEYWVQIGGVKGGNWSAPLSAIFTT

SEQ ID NO: 1623 - protein, 91 aa, synthetic construct
MSLPAPKNLVVSRVTEDSARLSWTAPDAAFDSFEIGYFGNLYLGEAIVLTVPGSERSYDLTGLKPGTEYWVQIGGVKGGNWSAPLSAIFTT

SEQ ID NO: 1624 - protein, 91 aa, synthetic construct
MSLPAPKNLVVSRVTEDSARLSWTAPDAAFDSFDIGYFEATYYGEAIVLTVPGSERSYDLTGLKPGTEYRVWIGGVKGGYYSNPLSAIFTT

SEQ ID NO: 1625 - protein, 91 aa, synthetic construct
MSLPAPKNLVVSRVTEDSARLSWTAPDAAFDSFEIGYFENLYLGEAIVLTVPGSERSYDLTGLKPGTEYWVQIGGVKGGNWSAPLSAIVTT

SEQ ID NO: 1626 - protein, 91 aa, synthetic construct
MSLPAPKNLVVSRVTEDSARLSWTAPDAAFDSFFIGYLEPQPPGEAIHLYVPGSERSYDLTGLKPGTEYNVTIQGVKVGFPSEPLIANFTT

SEQ ID NO: 1627 - protein, 91 aa, synthetic construct
MSLPAPKNLVVSRVTEDSARLSWTAPDAAFDSFEIGYWEGPGGGEAIILVVPGSERSYDLTGLKPGTEYYVQIGGVKGGDWSTPLWATFTT

SEQ ID NO: 1628 - protein, 91 aa, synthetic construct
MSLPAPENLVVSRVTEDSARLSWTAPDAAFDSFFIGYLEPQPPGEAIALYVPGSERSYDLTGLKPGTEYNVTIQGVKGGFPSLPLVATFTT

SEQ ID NO: 1629 - protein, 91 aa, synthetic construct
MSLPAPKNLVVSRVTEDSARLSWTAPDAAFDSFEIAYQELSLWGEAIVLTVPGSERSYDLTGLKPGTEYWVQIGGVKGGIWSSPLVASFTT

SEQ ID NO: 1630 - protein, 91 aa, synthetic construct
MSLPAPKNLVVSRVTEDSARLSWTAPDAAFDSFFIGYLEPQPPGEAIDLYVPGSERSYDLTGLKPGTEYNVTIQGVKGGFPSLPLVATFTT

SEQ ID NO: 1631 - protein, 91 aa, synthetic construct
MSLPAPKNLVVSRVTEDSARLSWTAPDAAFDSFNIMYHEHYDNGEAIVLTVPGSERSYDLTGLKPGTEYSVVINGVKGGPHSAPLSAIFTT

SEQ ID NO: 1632 - protein, 91 aa, synthetic construct
MSLPAPKNLVVSRVTEDSARLSWTAPDAAFDSFFIGYLEPQPPGEAIHLYVPGSERSYDLTGLKPGTEYNVTIQGVKGGFPSIPLIASFTT

SEQ ID NO: 1633 - protein, 91 aa, synthetic construct
MSLPAPKNLVVSRVTEDSARLSWTAPDAAFDSFEIGYFENLYLGEAIVLTVPGSERSYDLTGLKPGTEYCVYICGVKGGRDSMPLSAIFTT

SEQ ID NO: 1634 - protein, 91 aa, synthetic construct
MSLPAPKNLVVSRVTEDSARLSWTAPDAAFDSFEIGYWEMSYYGEAIVLTVPGSERSYDLTGLKPGTEYGVSIGGVKGGRWSLPLSAIFTT

SEQ ID NO: 1635 - protein, 91 aa, synthetic construct
MSLPAPKNLVVSRVTEDSSRLSWTAPDAAFDSFEIGYFENLYLGEAIVLTVPGSERSYDLTGLKPGTEYWVQIGGVKGGNWSAPLSAIFTT

SEQ ID NO: 1636 - protein, 91 aa, synthetic construct
MSLPAPKNLVVSRVTEDSARLSWTAPDAAFDSFFIGYLEPQPPGEAIELYVPGSERSYDLTGLKPGTEYNVTIQGVKGGFPSLPLVAIFTT

SEQ ID NO: 1637 - protein, 91 aa, synthetic construct
MSLPAPKNLVVSRVTEDSARLSWTAPDAAFDSFFIGYLEPQPPGEAIVLTVPGSERSYDLTGLKPGTEYNVTIQGVKGGFPSEPLIANFTT

SEQ ID NO: 1638 - protein, 91 aa, synthetic construct
MSLPAPKNLVVSRVTEDSARLSWTAPDAAFDSFFIGYLEPQPPGEAIALWVPGSERSYDLTGLKPGTEYNVTIQGVKGGFPSEPLVATFTT

SEQ ID NO: 1639 - protein, 91 aa, synthetic construct
MSLPAPKNLFVSRVTEDSARLSWTAPDAAFDSFEIGYWENAYKGEAIVLTVPGSERSYDLTGLKPGTEYWVQIGGVKGGNWSAPLSAIFTT

SEQ ID NO: 1640 - protein, 91 aa, synthetic construct
MSLPAPKNLVVSRVTEDSAHLSWTAPDAAFDSFEIGYFENDYFGEAIVLTVPGSERSYDLTGLKPGTEYVVFIGGVKGGKWSAPLSAIFTT

SEQ ID NO: 1641 - protein, 90 aa, synthetic construct
MLPAPKNLVVSRVTEDSARLSWTAPDAAFDSFFIGYLEPQPPGEAISLFVPGSERSYDLTGLKPGTEYNVTIQGVKGGFPSDPLNATFNT

SEQ ID NO: 1642 - protein, 90 aa, synthetic construct
MLPAPKNLVVSRVTEDSARLSWTAPDAAFDSFFIGYLEPQPPGEAIGLFVPGSERSYDLTGLKPGTEYNVTIQGVKGGFPSEPLKAAFTT

SEQ ID NO: 1643 - protein, 90 aa, synthetic construct
MLPAPKNLVVSRVTEDSARLSWTAPDAAFDSFEISYFENTWYGEAIVLTVPGSERSYDLTGLKPGTEYVVWIGGVKGGLWSKPLSAIFTT

SEQ ID NO: 1644 - protein, 90 aa, synthetic construct
MLPAPKNLVVSRVTEDSARLSWTAPDAAFDSFFIGYLEPQPPGEAIELYVPGSERSYDLTGLKPGTEYNVTIQGVKGGFPSEPLIAHFTT

SEQ ID NO: 1645 - protein, 90 aa, synthetic construct
MLPAPKNLVVSRVTEDSARLSWTAPDAAFDSFFIGYLEPQPPGEAISLFVPGSERSYDLTGLKPGTEYNVTIQGVKGGFPSMPLVAQFTT

SEQ ID NO: 1646 - protein, 90 aa, synthetic construct
MLPAPKNLVVSRVTEDSARLSWTAPDAAFDSFFIGYLEPQPPGEAITLAVPGSERSYDLTGLKPGTEYNVTIQGVKGGFPSNPLLAAFTT

SEQ ID NO: 1647 - protein, 90 aa, synthetic construct
MLPAPKNLVVSRVTEDSARLSWTAPDAAFDSFEIAYQELSLWGEAIVLTVPGSERSYDLTGLKPGTEYYVHIGGVKGGIWSSPLSAIFTT

SEQ ID NO: 1648 - protein, 90 aa, synthetic construct
MLPAPKNLVVSRVTEDSARLSWTAPDAAFDSFFIGYLEPQPPGEAIGLFVPGSERSYDLTGLKPGTEYNVTIQGVKGGFPSNPLEARFTT

SEQ ID NO: 1649 - protein, 90 aa, synthetic construct
MLPAPKNLVVSRVTEDSARLSWTAPDAAFDSFFIGYLEPQPPGEAIQLWVPGSERSYDLTGLKPGTEYNVTIQGVKGGFPSLPLVATFTT

SEQ ID NO: 1650 - protein, 90 aa, synthetic construct
MLPAPKNLVVSRVTEDSARLSWTAPDAAFDSFFIGYLEPQPPGEAIHLYVPGSERSYDLTGLKPGTEYNVTIQGVKGGFPSHPLYADFTT

SEQ ID NO: 1651 - protein, 90 aa, synthetic construct
MLPAPKNLVVSRITEDSARLSWTAPDAAFDSFFIGYLEPQPPGEAITLLVPASERSYDLTGLKPGTEYNVTIQGVKGGFPSHPLQAQFTT

SEQ ID NO: 1652 - protein, 90 aa, synthetic construct
MLPAPKNLVVSRVTEDSARLSWTAPDAAFDSFFIGYLEPQPPGEAIGLFVPGSERSYDLTGLKPGTEYNVTIQGVKGGFPSDPLVAYFTT

SEQ ID NO: 1653 - protein, 90 aa, synthetic construct
MLPAPKNLVVSRVTEDSARLSWTAPDAAFDSFEIGYWENAYKGEAIVLTVPGSERSYDLTGLKPGTEYVVFIGGVKGGVWSVPLSAIFTT

SEQ ID NO: 1654 - protein, 90 aa, synthetic construct; identical to SEQ ID NO: 443

SEQ ID NO: 1655 - protein, 90 aa, synthetic construct
MLPAPKNLVVSRVTEDSARLSWTAPDAAFDSFFIGYLEPQPPGEAISLYVPGSERSYDLTGLKPGTEYNVTIQGVKGGFPSHPLLAVFTT

SEQ ID NO: 1656 - protein, 90 aa, synthetic construct
MLPAPKNLVVSRVTEDSARLSWTAPDAAFDSFFIGYLEPQPPGEAIQLFVPGSERSYDLTGLKPGTEYNVTIQGVKGGFPSIPLSALFTT

SEQ ID NO: 1657 - protein, 90 aa, synthetic construct
MLPAPKNLVVSRVTEDSARLSWTAPDAAFDSFEIAYWENNFNGEAIILIVPGSERSYDLTGLKPGTEYVVFISGVKGGTWSYPLVAQFTT

SEQ ID NO: 1658 - protein, 90 aa, synthetic construct
MLPAPKNLVVSRVTEDSARLSWTAPDAAFDSFFIGYLEPQPPGEAIDLWVPGSERSYDLTGLKPGTEYNVTIQGVKGGFPSLPLSAIFTT

SEQ ID NO: 1659 - protein, 90 aa, synthetic construct
MLPAPNNLVVSRVTEDSARLSWTAPDAAFDSFFIGYLEPQPPGEAIHLFVPGSERSYDLTGLKPGTEYNVTIQGVKGGFPSGPLHATFTT

SEQ ID NO: 1660 - protein, 90 aa, synthetic construct
MLPAPKNLVVSRVTEDSARLSWTAPDAAFDSFFIGYLEPQPPGEAIVLWVPGSERSYDLTGLKPGTEYNVTIQGVKGGFPSHPLVAKFTT

SEQ ID NO: 1661 - protein, 90 aa, synthetic construct
MLPAPKNLVVSRVTEDSARLSWTAPDAAFDSFFIGYLEPQPPGEAIDLWVPGSERSYDLTGLKPGTEYNVTIQGVKGGFPSNPLKAQFTT

SEQ ID NO: 1662 - protein, 90 aa, synthetic construct
MLPAPKNLVVSRVTEDSARLSWTAPDAAFDSFYIAYAEPRPDGEAILLVVPGSERSYDLTGLKPGTEYSVLIHGVKGGLLSSPLVAFFTT

SEQ ID NO: 1663 - protein, 90 aa, synthetic construct
MLPAPKNLVVSRVTEDSARLSWTAPDAAFDSFFIGYLEPQPPGEAITLTVPGSERSYDLTGLKPGTEYNVTIQGVKGGFPSGPLIASFTT

SEQ ID NO: 1664 - protein, 90 aa, synthetic construct
MLPAPKNLVVSRVTEDSARLSWTAPDAAFDSFFIGYLEPQPPGEAIVLWVPGSERSYDLTGLKPGTEYNVTIQGVKGGFPSHPLVAKSTT

SEQ ID NO: 1665 - protein, 90 aa, synthetic construct
MLPAPKNLVVSRVTEDSARLSWTAPDAAFDSFYIAYAEPRPDGEAIVLVVPGSERSYDLTGLKPGTEYSVLIHGVKGGLLSSPLSAHFTT

SEQ ID NO: 1666 - protein, 90 aa, synthetic construct
MLPAPKNLVVSRVTEDSARLSWTAPDAAFDSFDIDYVEFGWTGEAIALLVPGSERSYDLTGLKPGTEYWVWIGGVKGGDYSPPLNAYFTT

SEQ ID NO: 1667 - protein, 90 aa, synthetic construct
MLPAPKNLVVSRVTEDSARLSWTAPDAAFDSFFIGYLEPQPPGEAINLLVPGSERSYDLTGLKPGTEYNVTIQGVKGGFPSLPLLAEFTT

SEQ ID NO: 1668 - protein, 90 aa, synthetic construct
MLPAPKNLVVSRVTEDSARLSWTAPDAAFDSFFIGYLEPQPPGEAISLFVPGSERSYDLTGLKPGTEYNVTIQGVKGGFPSDPLVASFTT

SEQ ID NO: 1669 - protein, 90 aa, synthetic construct
MLPAPKNLVVSRVTEDSARLSWTAPDAAFDSFYIAYAEPRPDGEAIQLSVPGSERSYDLTGLKPGTEYSVLIHGVKGGLLSSPLHASFTT

SEQ ID NO: 1670 - protein, 90 aa, synthetic construct
MLPAPKNLVVSRVTEDSARLSWTAPDAAFDSFFIGYLEPQPPGEAIDLTVPGSERSYDLTGLKPGTEYNVTIQGVKGGFPSMPLSAIFTT

SEQ ID NO: 1671 - protein, 90 aa, synthetic construct
MLPAPKNLVVSRVTEDSARLSWTAPDAAFDSFFIGYLEPQPPGEAIALLVPGSERSYDLTGLKPGTEYNVTIQGVKGGFPSNPLEAKFTT

SEQ ID NO: 1672 - protein, 90 aa, synthetic construct
MLPAPKNLVVSRVTEDSARLSWTAPDAAFDSFFIGYLEPQPPGEAIQLWVPGSERSYDLTGLKPGTEYNVTIQGVKGGFPSTPLQALFTT

SEQ ID NO: 1673 - protein, 90 aa, synthetic construct
MLPAPKNLVVSRVTEDSARLSWTAPDAAFDSFFIGYLEPQPPGEAIDLWVPGSERSYDLTGLKPGTEYNVTIQGVKGGFPSTPLIATVTT

SEQ ID NO: 1674 - protein, 90 aa, synthetic construct
MLPAPKNLVVSRVTEDSARLSWTAPDAAFDSFYIEYWEGYRSGEAIVLTVPGSERSYDLTGLKPGTEYRVHIWGVKGGAVSYPLSAIFTT

SEQ ID NO: 1675 - protein, 90 aa, synthetic construct
MLPAPKNLVVSRVTEDSARLSWTAPDAAFDSFFIGYLEPQPPGEAIGLFVPGSERSYDLTGLKPGTEYNVTIQGVKGGFPSMPLSAIFTT

SEQ ID NO: 1676 - protein, 90 aa, synthetic construct
MLPAPKNLVVSRVTEDSARLSWTAPDAAFDSFEIAYQELSLWGEAIVLTVPGSERSYDLTGLKPGTEYYVHIGGVKGGIWSRPLSAIFTT

SEQ ID NO: 1677 - protein, 90 aa, synthetic construct
MLPAPKNLVVSRVTEDSARLSWTAPDAAFDSFFIGYLEPQPPGEAIELYVPGSERSYDLTGLKPGTEYNVTIQGVKGGFPSDPLEADFTT

SEQ ID NO: 1678 - protein, 90 aa, synthetic construct
MLPAPKNLVVSRVTEDSARLSWTAPDAAFDSFFIGYLEPQPPGEAIDLWVPGSERSYDLTGLKPGTEYNVTIQGVKGGFPSLPLDAVFTT

SEQ ID NO: 1679 - protein, 90 aa, synthetic construct
MLPAPKNLVVSRVTEDSARLSWTAPDAAFDSFEIDYAENRHHGEAIALLVPGSERSYDLTGLKPGTEYIVFIGGVKGGRWSQPLVASFTT

SEQ ID NO: 1680 - protein, 90 aa, synthetic construct
MLPAPKNLVVSRVTEDSARLSWTAPDAAFDSFFIGYLEPQPPGEAIDLYVPGSERSYDLTGLKPGTEYNVTIQGVKGGFPSHPLQAHFTT

SEQ ID NO: 1681 - protein, 90 aa, synthetic construct
MLPAPKNLVVSRVTEDSARLSWTAPDAAFDSFYIAYAEPRPDGEAITLLVPGSERSYDLTGLKPGTEYSVLIHGVKGGLLSSPLSAIFTT

SEQ ID NO: 1682 - protein, 90 aa, synthetic construct
MLPAPKNLVVSRVTEDSARLSWTAPDAAFDSFFIGYLEPQPPGEAIHLVVPGSERSYDLTGLKPGTEYNVTIQGVKGGFPSDPLYAWFTT

SEQ ID NO: 1683 - protein, 90 aa, synthetic construct
MLPAPKNLVVSRVTEDSARLSWTAPDAAFDSFEIAYFEYCLNGEAIVLTVPGSERSYDLTGLKPGTEYWVQIGGVKGGTWSWPLSAIFTT

SEQ ID NO: 1684 - protein, 90 aa, synthetic construct
MLPAPKNLVVSRVTEDSARLSWTAPDAAFDSFFIGYLEPQPPGEAIHLLVPGSERSYDLTGLKPGTEYNVTIQGVKGGFPSMPLSAIVTT

SEQ ID NO: 1685 - protein, 90 aa, synthetic construct
MLPAPKNLVVSRVTEDSARLSWTAPDAAFDSFEIGYFERAWFGEAIVLTVPGSERSYDLTGLKPGTEYAVFIGGVKGGSYSYPLSAIFTT

SEQ ID NO: 1686 - protein, 90 aa, synthetic construct
MLPAPKNLIVSRVTEDSARLSWTAPDAAFDSFFIGYLEPQPPGEAISLYVPGSERSYDLTGLKPGTEYNVTIQGVKGGFPSDPLQAIFTT

SEQ ID NO: 1687 - protein, 90 aa, synthetic construct
MLPAPKNLVVSRVTEDSARLSWTAPDAAFDSFFIGYLEPQPPGEAIHLGVPGSERSYDLTGLKPGTEYNVTIQGVKGGFPSLPLVATFTT

SEQ ID NO: 1688 - protein, 90 aa, synthetic construct
MLPAPKNLVVSRVTEDSARLSWTAPDAAFDSFFIGYLEPQPPGEAIGLFVPGSERSYDLTGLKPGTEYNVTIQGVKGGFPSLPLQAHFTT

SEQ ID NO: 1689 - protein, 90 aa, synthetic construct
MLPAPKNLVVSRVTEDSARLSWTAPDAAFDSFFIGYLEPQPPGEAIYLLVPGSERSYDLTGLKPGTEYNVTIQGVKGGFPSTPLEASFTT

SEQ ID NO: 1690 - protein, 90 aa, synthetic construct
MLPAPKNLVVSRVTEDSARLSWTAPDTAFDSFFIGYLEPQPPGEAIGLFVPGSERSYDLTGLKPGTEYNVTIQGVKGGFPSDPLSAFFTT

SEQ ID NO: 1691 - protein, 90 aa, synthetic construct
MLPAPKNLVVSRVTEDSARLSWTAPDAAFDSFFIGYLEPQPPGEAIYLTVPGSERSYDLTGLKPGTEYNVTIQGVKGGFPSMPLSAIFTT

SEQ ID NO: 1692 - protein, 90 aa, synthetic construct
MLPAPKNLVVSRVTEDSARLSWTAPDAAFDSFIILYGEAQYDGEAIVLTVPGSERSYDLTGLKPGTEYPVDIYGVKGGPYSWPLSAIFTT

SEQ ID NO: 1693 - protein, 90 aa, synthetic construct
MLPAPKNLVVSRVTEDSARLSWTAPDAAFDSFFIGYLEPQPPGEAIYLTVPGSERSYDLTGLKPGTEYNVTIQGVKGGFPSKPLTANFTT

SEQ ID NO: 1694 - protein, 90 aa, synthetic construct
MLPAPKNLVVSRVTEDSARLSWTAPDAAFDSFFIGYLEPQPPGEAITLYVPGSERSYDLTGLKPGTEYNVTIQGVKGGFPSTPLTATFTT

SEQ ID NO: 1695 - protein, 90 aa, synthetic construct
MLPAPKNLVVSRVTEDSARLSWTAPDAAFDSFFIGYLEPQPPGEAIHLFVPGSERSYDLTGLKPGTEYNVTIQGVKGGFPSGPLHATFTT

SEQ ID NO: 1696 - protein, 90 aa, synthetic construct
MLPAPKNLVVSRVTEDSARLSWTAPDAAFDSFFIGYLEPQPPGEAIALWVPGSERSYDLTGLKPGTEYNITIQGVKGGFPSMPLVANFTT

SEQ ID NO: 1697 - protein, 89 aa, synthetic construct
MLPAPKNLVVSRVTEDSARLSWTAPDAAFDSFGIYYWEYTGGEAIVLTVPGSERSYDLTGLKPGTEYVVRILGVKGGAYSTPLSAIFTT

SEQ ID NO: 1698 - protein, 90 aa, synthetic construct
MLPAPKNLVVSRVTEDSARLSWTAPDAAFDSFYIAYAEPRPDGEAIVLDVPGSERSYDLTGLKPGTEYSVLIHGVKGGLLSSPLVADFTT

SEQ ID NO: 1699 - protein, 90 aa, synthetic construct
MLPAPKNLVVSRVTEDSARLSWTAPDAAFDSFFIGYLEPQPPGEAIHLLVPGSERSYDLTGLKPGTEYNVTIQGVKGGFPSEPLLAIVTT

SEQ ID NO: 1700 - protein, 90 aa, synthetic construct
MLPAPKNLVVSRVTEDSARLSWTAPDAAFDSFFIGYLEPQPPGEAIHLWVPGSERSYDLTGLKPGTEYNVTIQGVKGGFPSLPLSAFFTT

SEQ ID NO: 1701 - protein, 90 aa, synthetic construct
MLPAPKNLVVSRVTEDSARLSWTAPDAAFDSFFIDYDESLDSGEAIVLTVPGSERSYDLTGLKPGTEYNVTIQGVKGGFPSSPLEAAFTT

SEQ ID NO: 1702 - protein, 90 aa, synthetic construct
MLPAPKNLVVSRVTEDSARLSWTAPDAAFDSFEIAYFETCRTGEAIVLTVPGSERSYDLTGLKPGTEYRVWIGGVKGGVWSRPLSAIFTT

SEQ ID NO: 1703 - protein, 90 aa, synthetic construct
MLPAPKNLVVSRVTEDSARLSWTAPDAAFDSFFIGYLEPQPPGEAIGLWVPGSERSYDLTGLKPGTEYNVTIQGVKGGFPSMPLSAIFTT

SEQ ID NO: 1704 - protein, 90 aa, synthetic construct
MLPAPKNLVVSRVTEDSARLSWTAPDAAFDSFFIGYLEPQPPGEAIHLFVPGSERSYDLTGLKPGTEYNVTIQGVKGGFPSNPLSAQFTT

SEQ ID NO: 1705 - protein, 90 aa, synthetic construct
MLPAPKNLVVSRVTEDSARLSWTAPDAAFDSFFIGYLEPQPPGEAIALWVPGSERSYDLTGLKPGTEYNVTIQGVKGGFPSQPLHAHFTT

SEQ ID NO: 1706 - protein, 90 aa, synthetic construct
MLPAPKNLVVSRVTEDSARLSWTAPDAAFDSFFIGYLEPQPPGEAISLFVPGSERSYDLTGLKPGTEYNVTIQGVKGGFPSVPLSATFTT

SEQ ID NO: 1707 - protein, 90 aa, synthetic construct
MLPAPKNLVVSRVTEDSARLSWTAPDAAFDSFFIGYLEPQPPGEAIGLLVPGSERSYDLTGLKPGTEYNVTIQGVKGGFPSHPLLAVFTT

SEQ ID NO: 1708 - protein, 90 aa, synthetic construct
MLPAPKNLVVSRVTEDSARLSWTAPDAAFDSFFIGYLEPQPPGEAIYLRVPGSERSYDLTGLKPGTEYNVTIQGVKGGFPSAPLHAHFTT

SEQ ID NO: 1709 - protein, 90 aa, synthetic construct
MLPAPKNLVVSRVTEDSARLSWTAPDAAFDSFFIGYLEPQPPGEAIHLYVPGSERSYDLTGLKPGTEYNVTIQGVKGGFPSHPLIANFTT

SEQ ID NO: 1710 - protein, 90 aa, synthetic construct
MLPAPKNLVVSRVTEDSARLSWTAPDAAFDSFFIGYLEPQPPGEAIHLQVPGSERSYDLTGLKPGTEYNVTIQGVKGGFPSMPLSAIFTT

SEQ ID NO: 1711 - protein, 90 aa, synthetic construct
MLPAPKNLVVSRVTEDSARLSWTAPDAAFDSFFIGYLEPQPPGEAIALYVPGSERSYDLTGLKPGTEYNVTIQGVKGGFPSLPLVATFTT

SEQ ID NO: 1712 - protein, 90 aa, synthetic construct
MLPAPKNLVVSRVTEDSARLSWTAPDAAFDSFFIGYLEPQPPGEAIQLFVPGSERSYDLTGLKPGTEYNVTIQGVKGGFPSDPLVASFTT

SEQ ID NO: 1713 - protein, 90 aa, synthetic construct
MLPAPKNLVVSRVTEDSARLSWTAPDAAFDSFEIAYFENSYYGEAIVLTVPGSERSYDLTGLKPGTEYAVYIGGVKGGSWSNPLSAISTT

SEQ ID NO: 1714 - protein, 90 aa, synthetic construct
MLPAPKNLVVSRVTEDSARLSWTAPDAAFDSFFIGYLEPQPPGEAIALLVPGSERSYDLTGLKPGTEYNVTIQGVKGGFPSSPLNAYFTT

SEQ ID NO: 1715 - protein, 90 aa, synthetic construct
MLPAPKNLVVSRVTEDSARLSWTAPDAAFDSFFIGYLEPQPPGEAIHLQVPGSERSYDLTGLKPGTEYNVTIHGVKGGIPSMPLSAKFTT

SEQ ID NO: 1716 - protein, 90 aa, synthetic construct
MLPAPKNLVVSRVTEDSARLSWTAPDAAFDSFFIGYLEPQPPGEAIDLWVPGSERSYDLTGLKPGTEYNVTIQGVKGGFPSMPLEAVFTT

SEQ ID NO: 1717 - protein, 90 aa, synthetic construct
MLPAPKNLVVSRVTEDSARLSWTAPDAAFDSFFIGYLEPQPPGEAISLLVPGSERSYDLTGLKPGTEYNVTIQGVKGGFPSHPLDASFTT

SEQ ID NO: 1718 - protein, 90 aa, synthetic construct
MLPAPKNLVVSRVTEDSARLSWTAPDAAFDSFFIGYLEPQPPGEAIALYVPGSERSYDLTGLKPGTEYNVTIQGVKGGFPSEPLVATFTT

SEQ ID NO: 1719 - protein, 90 aa, synthetic construct
MLPAPKNLVVSRVTEDSARLSWTAPDAAFDSFFIGYLEPQPPGEAIHLIVPGSERSYDLTGLKPGTEYNVTIQGVKGGFPSDPLDASFTT

SEQ ID NO: 1720 - protein, 90 aa, synthetic construct
MLPAPKNLVVSRVTEDSARLSWTAPDAAFDSFFIGYLEPQPPGEAIGLLVPGSERSYDLTGLKPGTEYNVTIQGVKGGFPSNPLSAIFTT

SEQ ID NO: 1721 - protein, 90 aa, synthetic construct
MLPAPKNLVVSRVTEDSARLSWTAPDAAFDSFFIGYLEPQPPGEAIFLLVPGSERSYDLTGLKPGTEYNVTIQGVKGGFPSMPLSAIFTT

SEQ ID NO: 1722 - protein, 90 aa, synthetic construct
MLPAPKNLVVSRVTEDSARLSWTAPDAAFDSFFIGYLEPQPPGEAIHLRVPGSERSYDLTGLKPGTEYNVTIQGVKGGFPSDPLIAVFTT

SEQ ID NO: 1723 - protein, 90 aa, synthetic construct
MLPAPKNLVVSRVTEDSARLSWTAPDAAFDSFFIGYLEPQPPGEAISLYVPGSERSYDLTGLKPGTEYNVTIQGVKGGFPSNPLIAQFTT

SEQ ID NO: 1724 - protein, 90 aa, synthetic construct
MLPAPKNLVVSRVTEDSARLSWTAPDAAFDSFEIGYFERSFYGEAIILFVPGSERSYDLTGLKPGTEYAVWIGGVKGGVWSRPLSAIFTT

SEQ ID NO: 1725 - protein, 90 aa, synthetic construct
MLPAPKNLVVSRVTEDSARLSWTAPDAAFDSFFIGYLEPQPPGEAIDLWVPGSERSYDLTGLKPGTEYNVTIQGVKGGFPSYPLSASFTT

SEQ ID NO: 1726 - protein, 90 aa, synthetic construct
MLPAPKNLVVSRVTEDSARLSWTAPDAAFDSFFIGYLEPQPPGEAIVLFVPGSERSYDLTGLKPGTEYNVTIQGVKGGFPSNPLSAISTT

SEQ ID NO: 1727 - protein, 90 aa, synthetic construct
MLPAPKNLVVSRVTEDSARLSWTAPDAAFDSFFIGYLEPQPPGEAIALYVPGSERSYDLTGLKPGTEYNVTIQGVKGGFPSGPLEAYFTT

SEQ ID NO: 1728 - protein, 90 aa, synthetic construct
MLPAPKNLVVSRVTEDSARLSWTAPDAAFDSFFIGYLEPQPPGEAIALYVPGSERSYDLTGLKPGTEYNVTIQGVKGGFPSLPLEANFTT

SEQ ID NO: 1729 - protein, 90 aa, synthetic construct
MLPAPKNLVVSRVTEDSARLSWTAPDAAFDSFFIGYLEPQPPGEAIGLQVPGSERSYDLTGLKPGTEYNVTIQGVKGGFPSDPLQAIFTT

SEQ ID NO: 1730 - protein, 90 aa, synthetic construct
MLPAPKNLVVSRVTEDSARLSWTAPDAAFDSFFIGYLEPQPPGEAIALWVPGSERSYDLTGLKPGTEYNVTIQGVKGGFPSHPLAAVFTT

SEQ ID NO: 1731 - protein, 90 aa, synthetic construct
MLPAPKNLVVSRVTEDSARLSWTAPDAAFDSFFIGYLEPQPPGEAIHLLVPGSERSYDLTGLKPGTEYNVTIQGVKGGFPSEPLWAKFTT

SEQ ID NO: 1732 - protein, 90 aa, synthetic construct
MLPAPKNLVVSRVTEDSARLSWTAPDAAFDSFFIGYLEPQPPGEAISLWVPGSERSYDLTGLKPGTEYNVTIQGVKGGFPSTPLSAKFTT

SEQ ID NO: 1733 - protein, 90 aa, synthetic construct
MLPAPKNLVVSRVTEDSARLSWTAPDAAFDSFFIGYLEPQPPGEAIDLWVPGSERSYDLTGLKPGTEYNVTIQGVKGGFPSYPLLAIFTT

SEQ ID NO: 1734 - protein, 90 aa, synthetic construct
MLPAPKNLVVSRVTEDSARLSWTAPDAAFDSFFIGYLEPQPPGEAIHLFVPGSERSYDLTGLKPGTEYNVTIQGVKGGFPSVPLNAYFTT

SEQ ID NO: 1735 - protein, 90 aa, synthetic construct
MLPAPKNLVVSRVTEDSARLSWTAPDAAFDSFEIVYAEWTQHGEAIVLTVPGSERSYDLTGLKPGTEYYVHIGGVKGGKWSPPLYAIFTT

SEQ ID NO: 1736 - protein, 90 aa, synthetic construct
MLPAPKNLVVSRVTEDSARLSWTAPDAAFDSFFIGYLEPQPPGEAILLWVPGSERSYDLTGLKPGTEYNVTIQGVKGGFPSDPLIANFTT

SEQ ID NO: 1737 - protein, 90 aa, synthetic construct
MLPAPKNLVVSRVTEDSARLSWTAPDAAFDSFEIWYAEWRQVGEAIVLTVPGSERSYDLTGLKPGTEYNVDIHGVKGGKVSWPLSAISTT

SEQ ID NO: 1738 - protein, 90 aa, synthetic construct
MLPAPKNLVVSRVTEDSARLSWTAPDAAFDSFFIGYLEPQPPGEAIELYVPGSERSYDLTGLKPGTEYNVTIQGVKGGFPSDPLHAAFTT

SEQ ID NO: 1739 - protein, 90 aa, synthetic construct
MLPAPKNLVVSRVTEDSARLSWTAPDAAFDSFEIDYVEFIFTGEAIGLIVPGSERSYDLTGLKPGTKYWVTIAGVKGGEWSTPLQAFFTT

SEQ ID NO: 1740 - protein, 90 aa, synthetic construct
MLPAPKNLVVSRVTEDSARLSWTAPDAAFDSFFIGYLEPQPPGEAIHLFVPGSERSYDLTGLKPGTEYNVTIQGVKGGFPSDPLVASFTT

SEQ ID NO: 1741 - protein, 90 aa, synthetic construct
MLPAPKNLVVSRVTEDSARLSWTAPDAAFDSFFIGYLEPQPPGEAIQLFVPGSERSYDLTGLKPGTEYNVTIQGVKGGFPSLPLIAYFTT

SEQ ID NO: 1742 - protein, 90 aa, synthetic construct
MLPAPKNLVVSRVTEDSARLSWTAPDAAFDSFFIGYLEPQPPGEAIYLYVPGSERSYDLTGLKPGTEYNVTIQGVKGGFPSYPLTAQFTT

SEQ ID NO: 1743 - protein, 90 aa, synthetic construct
MLPAPKNLVVSRVTEDSARLSWTAPDAAFDSFFIGYLEPQPPGEAIDLYVPGSERSYDLTGLKPGTEYNVTIQGVKGGFPSMPLYARFTT

SEQ ID NO: 1744 - protein, 90 aa, synthetic construct
MLPAPKNLVVSRVTEDSARLSWTAPDAAFDSFYIAYQELSLWGEAIVLTVPGSERSYDLTGLKPGTEYNVTIQGVKGGFPSLPLAAQFTT

SEQ ID NO: 1745 - protein, 90 aa, synthetic construct
MLPAPKNLVVSRVTEDSARLSWTAPDAAFDSFFIGYLEPQPPGEAISLFVPGSERSYDLTGLKPGTEYNVTIQGVKGGFPSEPLAAKFTT

SEQ ID NO: 1746 - protein, 90 aa, synthetic construct
MLPAPKNLVVSRVTEDSARLSWTAPDAAFDSFFIGYLEPQPPGEAIGLLVPGSERSYDLTGLKPGTEYNVTIQGVKGGFPSIPLVADFTT

SEQ ID NO: 1747 - protein, 90 aa, synthetic construct
MLPAPKNLVVSRVTEDSARLSWTAPDAAFDSFFIGYLEPQPPGEAIHLQVPGSERSYDLTGLKPGTEYNVTIQGVKGGFPSIPLVAQFTT

SEQ ID NO: 1748 - protein, 90 aa, synthetic construct
MLPAPKNLVVSRVTEDSARLSWTAQDAAFDSFFIGYLEPQPPGEAIALLVPGSERSYDLTGLKPGTEYNVTIQGVKGGFPSHPLSASFTT

SEQ ID NO: 1749 - protein, 90 aa, synthetic construct
MLPAPKNLVVSRVTEDSARLSWTAPDAAFDSFFIGYLEPQPPGEAINLTVPGSERSYDLTGLKPGTEYNVTIQGVKGGFPSYPLQASFTT

SEQ ID NO: 1750 - protein, 90 aa, synthetic construct
MLPAPKNLVVSRVTEDSARLSWTAPDAAFDSFTISYPEEAKHGEAIVLTVPGSERSYDLTGLKPGTEYGVPINGVKGGVSSLPLSAIFTT

SEQ ID NO: 1751 - protein, 90 aa, synthetic construct
MLPAPKNLVVSRVTEDSARLSWTAPDAAFDSFFIGYLEPQPPGEAIALYVPGSERSYDLTGLKPGTEYNVTIQGVKGGFPSHPLQAHFTT

SEQ ID NO: 1752 - protein, 90 aa, synthetic construct
MLPAPKNLVVSRVTEDSARLSWTAPDAAFDSFFIGYLEPQPPGEAIVLLVPGSERSYDLTGLKPGTEYNVTIQGVKGGFPSAPLVATFTT

SEQ ID NO: 1753 - protein, 91 aa, synthetic construct
MLPAPKNLVVSRVTEDSARLSWTAPDAAFDSFLDLLPSNWDIAGEAIVLTVPGSERSYDLTGLKPGTEYHVNILGVKGGKESLPLVANFTT

SEQ ID NO: 1754 - protein, 90 aa, synthetic construct
MLPAPKNLVVSRVTEDSARLSWTAPDAAFDSFFIRYLEPQPPGEAIHLSVPGSERSYDLTGLKPGTEYNVTIQGVKGGFPSMPLYAIFTT

SEQ ID NO: 1755 - protein, 90 aa, synthetic construct
MLPAPKNLVVSRVTEDSARLSWTAPDAAFDSFFIGYLEPQPPGEAISLYVPGSERSYDQTGLKPGTEYNVTIQGVKGGFPSDPLSARFTT

SEQ ID NO: 1756 - protein, 90 aa, synthetic construct
MLPAPKNLVVSRVTEDSARLSWTAPDAAFDSFFIGYLEPQPPGEAIGLFVPGSERSYDLTGLKPGTEYNVTIQGVKGGFPSMPLSPIFTT

SEQ ID NO: 1757 - protein, 90 aa, synthetic construct
MLPAPKNLVVSRVTEDSARLSWTAPDAAFDSFFIGYLEPQPPGEAIHLQVPGSERSYDLTGLKPGTEYNVTIQGVKGGFPSVPLHARFTT

SEQ ID NO: 1758 - protein, 90 aa, synthetic construct
MLPAPKNLVVSRVTEDSARLSWTAPDAAFDSFLILYIEQDHRGEAIVLTVPGSERSYDLTGLKPGTEYWVHITGVKGGYYSAPLSAIFTT

SEQ ID NO: 1759 - protein, 90 aa, synthetic construct
MLPAPKNLVVSRVTEDSARLSWTAPDAAFDSFFIGYLEPQPPGEAIQLFVPGSERSYDLTGLKPGTEYNVTIQGVKGGFPSTPLVASFTT

SEQ ID NO: 1760 - protein, 90 aa, synthetic construct
MLPAPKNLVVSRVTEDSARLSWTAPDAAFDSFFIGYLEPQPPGEAIDLYVPGSERSYDLTGLKPGTEYNVTIQGVKGGFPSEPLWADFTT

SEQ ID NO: 1761 - protein, 90 aa, synthetic construct
MLPAPKNLVVSRVTEDSARLSWTAPDAAFDSFYIAYAEPRPDGEAIWLLVPGSERSYDLTGLKPGTEYSVLIHGVKGGLLSSPLSADFTT

SEQ ID NO: 1762 - protein, 90 aa, synthetic construct
MLPAPKNLVVSRVTEDSARLSWTAPDAAFDSFFIGYLEPQPPGEAIQLLVPGSERSYDLTGLKPGTEYNVTIQGVKGGFPSDPLVAYSTT

SEQ ID NO: 1763 - protein, 90 aa, synthetic construct
MLPAPKNLVVSRVTEDSARLSWTAPDAAFDSFLIQYDEEGVWGEAIVLTVPGSERSYDLTGLKPGTEYSVGIGGVKGGWSSVPLSAIFTT

SEQ ID NO: 1764 - protein, 90 aa, synthetic construct
MLPAPKNLVVSRVTEDSARLSWTAPDAAFDSFFIGYLEPQPPGEAIHLYVPGSERSYDLTGLKPGTEYNVTIQGVKGGFPSLPLVATFTT

SEQ ID NO: 1765 - protein, 90 aa, synthetic construct
MLPAPKNLVVSRVTEDSARLSWTAPDAAFDSFFIGYLEPQPPGEAITLLVPGSERSYDLTGLKPGTEYNVTIQGVKGGFPSMPLSAIFTT

SEQ ID NO: 1766 - protein, 90 aa, synthetic construct
MLPAPKNLVVSRVTEDSARLSWTAPDAAFDSFTIWYYESPTGGEAIVLTVPGSERSYDLTGLKPGTEYMVFIQGVKGGCFSTPLYAIFTT

SEQ ID NO: 1767 - protein, 90 aa, synthetic construct
MLPAPKNLVVSRVTEDSARLSWTAPDAAFDSFFIGYLEPQPPGEAIELYVPGSERSYDLTGLKPGTEYNVTIQGVKGGFPSLPLVATFTT

SEQ ID NO: 1768 - protein, 90 aa, synthetic construct
MLPAPKNLVVSRVTEDSARLSWTAPDAAFDSFFIGYLEPQPPGEAIDLWVPGSERSYDLTGLKPGTEYNVTIQGVKGGFPSLPLSASFTT

SEQ ID NO: 1769 - protein, 90 aa, synthetic construct
MLPAPKNLVVSRVTEDSARLSWTAPDAAFDSFFIGYLEPQPPGEAIGLAVPGSERSYDLTGLKPGTEYNVTIQGVKGGFPSEPLIADFTT

SEQ ID NO: 1770 - protein, 90 aa, synthetic construct
MLPAPKNLVVSRVTEDSARLSWTAPDAAFDSFFIGYLEPQPPGEAITLYVPGSERSYDLTGLKPGTEYNVTIQGVKGGFPSIPLSAEFTT

SEQ ID NO: 1771 - protein, 90 aa, synthetic construct
MLPAPKNLVVSRVTEDSARLSWTAPDAAFDSFFIGYLEPQPPGEAIHLQVPGSERSYDLTGLKPGTEYNVTIQGVKGGFPSIPLIAVFTT

SEQ ID NO: 1772 - protein, 90 aa, synthetic construct
MLPAPKNLVVSRVTEDSARLSWTAPDAAFDSFEIAYFETCRTGEAIVLTVPGSERSYDLTGLKPGTEYGVSIYGVKGGAHSGPLSAIFTT

SEQ ID NO: 1773 - protein, 90 aa, synthetic construct
MLPAPKNLVVSRVTEDSARLSWTAPDAAFDSFFIGYLEPQPPGEAIHLYVPGSERSYDLTGLKPGTEYNVTIQGVKGGFPSVPLIAKFTT

SEQ ID NO: 1774 - protein, 90 aa, synthetic construct
MLPAPKNLVVSRVTEDSARLSWTAPDAAFDSFFIGYLEPQPPGEAINLWVPGSERSYDLTGLKPGTEYNVTIQGVKGGFPSTPLFAGFTT

SEQ ID NO: 1775 - protein, 90 aa, synthetic construct
MLPAPKNLVVSRVTEDSARLSWTAPDAAFDSFEIDYAEDIREGEAIALVVPGSERSYDLTGLKPGTEYWVSIGGVKGGTWSRPLFAPFTT

SEQ ID NO: 1776 - protein, 90 aa, synthetic construct
MLPAPKNLVVSRVTEDSARLSWTAPDAAFDSFFIGYLEPQPPGEAITLYVPGSERSYDMTGLKPGTEYNVTIQGVKGGFPSLPLQAHFTT

SEQ ID NO: 1777 - protein, 90 aa, synthetic construct
MLPAPKNLIVSRVTEDSARLSWTAPDAAFDSFFIGYLEPQPPGEAIHLQVPGSERSYDLTGLKPGTEYNVTIQGVKGGFPSNPLHAEFTT

SEQ ID NO: 1778 - protein, 90 aa, synthetic construct
MLPAPKNLVVSRVTEDSARLSWTAPDAAFDSFFIGYLEPQPPGEAITLVVPGSERSYDLTGLKPGTEYNVTIQGVKGGFPSDPLVASFTT

SEQ ID NO: 1779 - protein, 90 aa, synthetic construct
MLPAPKNLVVSRVTEDSARLSWTAPDAAFDSFEIAYQELSLWGEAIVLTVPGSERSYDLTGLKPGTEYYVHIGGVKGGIWSSPLSAISTT

SEQ ID NO: 1780 - protein, 90 aa, synthetic construct
MLPAPKNLVVSRVTEDSARLSWTAPDAAFDSFFIGYLEPQPPGEAIHLWVPGSERSYDLTGLKPGTEYNVTIQGVKGGFPSLPLLAKFTT

SEQ ID NO: 1781 - protein, 90 aa, synthetic construct
MLPAPENLVVSRVTEDSARLSWTALDAAFDSFFIGYLEPQPPGEAISLLVPGSERSYDLTGLKPGTEYNVTIQGVKGGIASEPLSAAFTT

SEQ ID NO: 1782 - protein, 90 aa, synthetic construct
MLPAPKNLVVSRVTEDSARLSWTAPDAAFDSFFIGYLEPQPPGEAIGLRVPGSERSYDLTGLKPGTEYNVTIQGVKGGFPSEPLIADFTT

SEQ ID NO: 1783 - protein, 90 aa, synthetic construct
MLPAPKNLVVSRVTEDSARLSWTAPDAAFDSFIIQYGEYLRWGEAIVLTVPGSERSYDLTGLKPGTEYQVEIYGVKGGPLSKPLSAIFTT

SEQ ID NO: 1784 - protein, 89 aa, synthetic construct
MLAPKNLVVSRVTEDSARLSWTAPDAAFDSFFIGYLEPQPPGEAISLLVPGSERSYDLTGLKPGTEYNVTIQGVKGGFPSSPLLAGFTT

SEQ ID NO: 1785 - protein, 90 aa, synthetic construct
MLPAPKNLVVSRVTEDSARLSWTAPDAAFDSFFIGYLEPQPPGEAISLQVPGSERSYDLTGLKPGTEYNVTIQGVKGGFPSAPLVANFTT

SEQ ID NO: 1786 - protein, 90 aa, synthetic construct
MLPAPKNLVVSRVTEDSARLSWTAPDAAFDSFFIGYLEPQPSGEAIHLIVPGSERSYDLTGLKPGTEYNVTIQGVKGGFPSDPLVASFTT

SEQ ID NO: 1787 - protein, 90 aa, synthetic construct; identical to SEQ ID NO: 1660

SEQ ID NO: 1788 - protein, 90 aa, synthetic construct
MLPAPKNLVVSRVTEDSARLSWTAPDAAFDSFFIGYLEPQPPGEAILLAVPGSERSYDLTGLKPGTEYNVTIQGVKGGFPSLPLVAHFTT

SEQ ID NO: 1789 - protein, 90 aa, synthetic construct
MLPAPKNLVVSRVTEDSARLSWTTPDAAFDSFFIGYLEPQPPGEAISLYVPGSERSYDLTGLKPGTEYNVTIQGVKGGFPSMPLSAIFTT

SEQ ID NO: 1790 - protein, 90 aa, synthetic construct
MLPAPKNLVVSRVTEDSARLSWTAPDAAFDSFFINYREDKWIGEAIVLTVPGSERSYDLTGLKPGTEYSVPIDGVKGGAASPPLSAIFTT

SEQ ID NO: 1791 - protein, 90 aa, synthetic construct
MLPAPKNLVVSRVTEDSARLSWTAPDAAFDSFFIGYLEPQPPGEAIILWVPGSERSYDLTGLKPGTEYNVTIQGVKGGFPSVPLIAQFTT

SEQ ID NO: 1792 - protein, 90 aa, synthetic construct
MLPAPKNLVVSRVTEDSARLSWTAPDAAFDSFFIGYLEPQPPGEAITLLVPGSERSYDLTGLKPGTEYNVTIQGVKGGFPSKPLYAYFTT

SEQ ID NO: 1793 - protein, 90 aa, synthetic construct
MLPAPKNLVVSRVTEDSARLSWTAPDAAFDSFFIGYLEPQPPGEAIILWVPGSERSYDLTGLKPGTEYNVTIQGVKGGFPSIPLIAVFTT

SEQ ID NO: 1794 - protein, 90 aa, synthetic construct
MLPAPKNLVVSRVTEDSARLSWTAPDAAFDSFFIGYLEPQPPGEAISLYVPGSERSYDLTGLKPGTEYNVTIQGVKGGFPSSPLFADFTT

SEQ ID NO: 1795 - protein, 90 aa, synthetic construct
MLPAPKNLVVSRVTEDSARLSWTAPDAAFDSFFIGYLEPQPPGEAIDLLVPGSERSYDLTGLKPGTEYNVTIQGVKGGFPSMPLSAIFTT

SEQ ID NO: 1796 - protein, 90 aa, synthetic construct
MLPAPKNLVVSRVTEDSARLSWTAPDAAFDSFFIGYLEPQPPGEAISLLVPGSERSYDLTGLKPGTEYNVTIQGVKGGFPSVPLSAIFTT

SEQ ID NO: 1797 - protein, 90 aa, synthetic construct
MLPAPKNLVVSRVTEDSARLSWTAPDAAFDSFFIGYLEPQPPGEAIGLHVPGSERSYDLTGLKPGTEYNVTIQGVKGGFPSIPLEAKFTT

SEQ ID NO: 1798 - protein, 90 aa, synthetic construct
MLPAPKNLVVSRVTEDSARLSWTAPDAAFDSFEISYFETSWHGEAIVLTVLGSERSYDLTGLKPGTEYRVYIGGVKGGSWSQPLSAIFTT

SEQ ID NO: 1799 - protein, 90 aa, synthetic construct
MLPAPKNLVVSRVTEDSARLSWTAPDAAFDSFFIGYLEPQPPGEAIGLVVPGSERSYDLTGLKPGTEYNVTIQGVKGGFPSHPLGAIFTT

SEQ ID NO: 1800 - protein, 90 aa, synthetic construct
MLPAPKNLVVSRVTEDSARLSWTALDAAFDSFFIGYLEPQPPGEAIHLFVPGSERSYDLTGLKPGTEYNVTIQGVKGGFPSEPLIANFTT

SEQ ID NO: 1801 - protein, 90 aa, synthetic construct
MLPAPKNLVVSRVTEDSARLSWTAPDAAFDSFEIGYWENAYKGEAIVLTVPGSERSYDLTGLKPGTEYVVFIGGVKGGVWSVPLSAISTT

SEQ ID NO: 1802 - protein, 90 aa, synthetic construct
MLPAPKNLVVSRVTEDSARLSWTAPDAAFDSFFIGYLEPQPPGEAIHLLVPGSERSYDLTGLKPGTEYNVTIQGVKGGFPSMPLSAIFTT

SEQ ID NO: 1803 - protein, 90 aa, synthetic construct
MLPAPKNLVVSRVTEDSARLSWTAPDAAFDSFFIGYLEPQPPGEAITLSVPGSERSYDLTGLKPGTEYNVTIQGVKGGFPSEPLIAIFTT

SEQ ID NO: 1804 - protein, 90 aa, synthetic construct
MLPAPKNLVVSRVTEDSARLSWTAPDAAFDSFEIGYWENAYKGEAIVLTVPGSERSYDLTGLKPGTEYEVFIGGVKGGVWSVPLSAIFTT

SEQ ID NO: 1805 - protein, 90 aa, synthetic construct
MLPAPKNLVVSRVTEDSARLSWTAPDAAFDSFFIAYGESPESGEAIVLTVPGSERSYDLTGLKPGTEYLVWIAGVKGGYYSDPLSAIFTT

SEQ ID NO: 1806 - protein, 90 aa, synthetic construct
MLPAPKNLVVSRVTEDSARLSWTAPDAAFDSFFIGYLEPQPPGEAIDLFVPGSERSYDLTGLKPGTEYNVTIQGVKGGFPSLPLVASFTT

SEQ ID NO: 1807 - protein, 90 aa, synthetic construct
MLPAPKNLVVSRVTEDSARLSWTAPDAAFDSFFIGYLEPQPPGEAIDLWVPGSERSYDLTGLKPGTEYNVTIQGVKGGFPSDPLDAHFTT

SEQ ID NO: 1808 - protein, 90 aa, synthetic construct
MLPAPKNLVVSRVTEDSARLSWTAPDAAFDSFFIGYLEPQPPGEAISLYVPGSERSYDLTGLKPGTEYNVTIQGVKGGFPSLPLAAQFTT

SEQ ID NO: 1809 - protein, 90 aa, synthetic construct
MLPAPKNLVVSRVTEDSARLSWTAPDAAFDSFFIGYLEPQPPGEAIHLFVPGSERSYDLTGLKPGTEYNVTIQGVKGGFPSEPLIANFTT

SEQ ID NO: 1810 - protein, 90 aa, synthetic construct
MLPAPKNLVVSRVTEDSARLSWTAPDAAFDSFFIGYLEPQPPGEAIALWVPGSERSYDLTGLKPGTEYNVTIQGVKGGFPSTPLIAQFTT

SEQ ID NO: 1811 - protein, 90 aa, synthetic construct
MLPAPKNLVVSRVTEDSARLSWTAPDAAFDSFFIGYLEPQPPGEAISLWVPGSERSYDLTGLKPGTEYNVTIQGVKGGFPSSPLVAYFTT

SEQ ID NO: 1812 - protein, 90 aa, synthetic construct
MLPAPKNLVVSRVTEDSARLSWTAPDAAFDSFFIGYLEPQPPGEAIALVVPGSERSYDLTGLKPGTEYNVTIQGVKGGFPSMPLFAYFTT

SEQ ID NO: 1813 - protein, 90 aa, synthetic construct
MLPAPKNLVVSRVTEDSARLSWTAPDAAFDSFFIGYLEPQPPGEAISLWVPGSERSYDLTGLKPGTEYNVTIQGVKGGFPSDPLGAHFTT

SEQ ID NO: 1814 - protein, 90 aa, synthetic construct
MLPAPKNLVVSRVTEDSARLSWTAPDAAFDSFPIAYPEHLPPGEAIVLTVPGSERSYDLTGLKPGTEYPVNIRGVKGGFVSFPLSAIFTT

SEQ ID NO: 1815 - protein, 90 aa, synthetic construct; identical to SEQ ID NO: 1660

SEQ ID NO: 1816 - protein, 90 aa, synthetic construct
MLPAPKNLVVSRVTEDSARLSWTAPDAAFDSFFIGYLEPQPPGEAIVLWVPGSERSYDLTGLKPGTEYNVTIQGVKGGFPSHPLVAHFTT

SEQ ID NO: 1817 - protein, 90 aa, synthetic construct
MLPAPKNLVVSRVTEDSARLSWTAPDAAFDSFFIGYLEPQPPGEAITLYVPGSERSYDLNGLKPGTEYNVTIQGVKGGFPSMPLSAIFTT

SEQ ID NO: 1818 - protein, 90 aa, synthetic construct
MLPAPKNLVVSRVTEDSARLSWTAPDAAFDSFFIGYLEPQPPGEAIDLLVPGSERSYDLTGLKPGTEYNVTIQGVKGGFPSEPLTAEFTT

SEQ ID NO: 1819 - protein, 90 aa, synthetic construct
MLPAPKNLVVSRVTEDSARLSWTAPDAAFDSFFIGYLEPQPPGEAIHLWVPGSERSYDLTGLKPGTEYNVTIQGVKGGFPSMPLSAIFTT

SEQ ID NO: 1820 - protein, 90 aa, synthetic construct; identical to SEQ ID NO: 1718

SEQ ID NO: 1821 - protein, 90 aa, synthetic construct
MLPAPKNLVVSRVTEDSARLSWTAPDAAFDSFFIGYLEPQPPGEAISLIVPGSERSYDLTGLKPGTEYNVTIQGVKGGFPSDPLIAIFTT

SEQ ID NO: 1822 - protein, 90 aa, synthetic construct
MLPAPKNLVVSRVTEDSARLSWTAPDAAFDSFFIGYLEPQPPGEAIHLYVPGSERSYDLTGLKPGTEYNVTIQGVKGGFPSEPLIANFTT

SEQ ID NO: 1823 - protein, 90 aa, synthetic construct
MLPAPKNLVVSRVTEDSARLSWTAPDAAFDSFFIGYLEPQPPGEAITLLVPGSERSYDLTGLKPGTEYNVTIQGVKGGFPSIPLIAIFTT

SEQ ID NO: 1824 - protein, 90 aa, synthetic construct
MLPAPKNLVVSRVTEDSARLSWTAPDAAFDSFFIGYLEPQPPGEAIDLYVPGSERSYDLTGLKPGTEYNVTIQGVKGGFPSLPLQAHFTT

SEQ ID NO: 1825 - protein, 90 aa, synthetic construct
MLPAPKNLVVSRVTEDSARLSWTAPDAAFDSFFIGYLEPQPPGEAIDLLVPGSERSYDLTGLKPGTEYNVTIQGVKGGFPSEPLFAHFTT

SEQ ID NO: 1826 - protein, 90 aa, synthetic construct
MLPAPKNLVVSRVTEDSARLSWTAPDAAFDSFEIGYFEYSYYGEAIVLTVPGSERSYDLTGLKPGTEYRVYIGGVKGGGWSRPLSAIFTT

SEQ ID NO: 1827 - protein, 90 aa, synthetic construct
MLPAPKNLVVSRVTEDSARLSWTAPDAAFDSFDINYDELSGEGEAIALFVPGSERSYDLTGLKPGTEYWVSIGGVKGGRFSEPLYARFTT

SEQ ID NO: 1828 - protein, 90 aa, synthetic construct
MLPAPKNLVVSRVTEDSARLSWTAPDAAFDSFFIGYLEPQPPGEAINLFVPGSERSYDLTGLKPGTEYNVTIQGVKGGFPSMPLSAIFTT

SEQ ID NO: 1829 - protein, 90 aa, synthetic construct
MLPAPKNLVVSRVTEDSARLSWTAPDAAFDSFFIGYLEPQPPGEAIHLLVPGSERSYDLTGLKPGTEYNVTIQGVKGGFPSGPLQASFTT

SEQ ID NO: 1830 - protein, 90 aa, synthetic construct
MLPAPKNLVVSRVTEDSARLSWTAPDAAFDSFFIGYLEPQPPGEAIHLQVPGSERSYDLTGLKPGTEYNVTIQGVKGGFPSDPLVAKFTT

SEQ ID NO: 1831 - protein, 90 aa, synthetic construct
MLPAPKNLVVSRVTEDSARLSWTAPDAAFDSFDIGYTETVSFGEAIVLTVPGSERSYDLTGLKPGTEYIVKILGVKGGFASFPLSAIFTT

SEQ ID NO: 1832 - protein, 90 aa, synthetic construct
MLPAPKNLVVSRVTEDSARLSWTAPDAAFDSFEIGYFENLYLGEAIVLTVPGSERSYDLTGLKPGTEYWVQIGGVKGGNWSAPLSAIFTT

SEQ ID NO: 1833 - protein, 90 aa, synthetic construct
MLPAPKNLVVSRVTEDSARLSWTAPDAAFDSFFIGYLEPQPPGEAIDLYVPGSERSYDLTGLKPGTEYNVTIQGVKGGFPSHPLVAVFTT

SEQ ID NO: 1834 - protein, 90 aa, synthetic construct
MLPAPKNLVVSRVTEDSARLSWTAPDAAFDSFFIGYLEPQPPGEAIHLFVPGSERSYDLTGLKPGTEYNVTIQGVKGGFPSDPLHAAFTT

SEQ ID NO: 1835 - protein, 90 aa, synthetic construct
MLPAPKNLVVSRVTEDSARLSWTAPDAAFDSFYIAYAEPRPDGEAIILVVPGSERSYDLTGLKPGTEYSVLIHGVKGGLLSSPLDAGFTT

SEQ ID NO: 1836 - protein, 90 aa, synthetic construct
MLPAPKNLVVSRVTEDSARLSWTAPDAAFDSFFIGYLEPQPPGEAIDLWVPGSERSYDLTGLKPGTEYNVTIQGVKGGFPSMPLDAYFTT

SEQ ID NO: 1837 - protein, 90 aa, synthetic construct
MLPAPKNLVVSRVTEDSARLSWTAPDAAFDSFFIGYLEPQPPGEAIELFVPGSERSYDLTGLKPGTEYNVTIQGVKGGFPSMPLSAIFTT

SEQ ID NO: 1838 - protein, 90 aa, synthetic construct
MLPAPKNLVVSRVTEDSARLSWTAPDAAFDSFFIGYLEPQPPGEAISLYVPGSERSYDLTGLKPGTEYNVTIQGVKGGFPSIPLVAVFTT

SEQ ID NO: 1839 - protein, 90 aa, synthetic construct
MLPAPKNLVVSRVTEDSARLSWTAPDAAFDSFFIGYLEPQPPGEAIALLVPGSERSYDLTGLKPGTEYNVTIQGVKGGFPSHPLSASFTT

SEQ ID NO: 1840 - protein, 90 aa, synthetic construct
MLPAPKNLVVSRVTEDSARLSWTAPDAAFDSFFIGYLEPQPPGEAISLVVPGSERSYDLTGLKPGTEYNVTIQGVKGGFPSNPLIATFTT

SEQ ID NO: 1841 - protein, 90 aa, synthetic construct
MLPAPKNLVVSRVTEDSARLSWTAPDAAFDSFEIAYIEVNIQGEAIVLTVPGSERSYDLTGLKPGTEYYVHIGGVKGGPSSSPLSAIFTT

SEQ ID NO: 1842 - protein, 90 aa, synthetic construct
MLPAPKNLVVSRVTEDSARLSWTAPDAAFDSFFIGYLEPQPPGEAIHLIVPGSERSYDLTGLKPGTEYNVTIQGVKGGFPSDPLVASFTT

SEQ ID NO: 1843 - protein, 90 aa, synthetic construct
MLPAPKNLVVSRVTEDSARLSWTAPDAAFDSFFIGYLEPQPPGEAIYLFVPGSERSYDLTGLKPGTEYNVTIQGVKGGFPSMPLSAIFTT

SEQ ID NO: 1844 - protein, 90 aa, synthetic construct
MLPAPKNLVVSRVTEDSARLSWTAPDAAFDSFFIGYLEPQPPGEAISLWVPGSERSYDLTGLKPGTEYNVTIQGVKGGFPSMPLSAIFTT

SEQ ID NO: 1845 - protein, 90 aa, synthetic construct
MLPAPKNLVVSRVTEDSARLSWTAPDAAFDSFFIGYLEPQPPGEAIHLFVPGSERSYDLTGLKPGTEYNVTIQGVKGGFPSIPLYARFTT

SEQ ID NO: 1846 - protein, 90 aa, synthetic construct
MLPAPKNLVVSRVTEDSARLSWTAPDAAFDSFEIAYFETCRTGEAIVLTVPGSERSYDLTGLKPGTEYWVQIGGVKGGNWSAPLSAIFTT

SEQ ID NO: 1847 - protein, 90 aa, synthetic construct
MLPAPKNLVVSRVTEDSARLSWTAPDAAFDSFFIGYLEPQPPGEAIHLFVPGSERSYDLTGLKPGTEYNVTIQGVKGGFPSMPLSAIFTT

SEQ ID NO: 1848 - protein, 90 aa, synthetic construct
MLPAPKNLVVSRVTEDSARLSWTAPDAAFDSFFIGYLEPQPPGEAIELYVPGSCRSYDLTGLKPGTEYNVTIQGVKGGFPSLPLVATFTT

SEQ ID NO: 1849 - protein, 90 aa, synthetic construct
MLPAPKNLVVSRVTEDSARLSWTAPDAAFDSFFIGYLEPQPPGEAIHLYVPGSCRSYDLTGLKPGTEYNVTIQGVKGGFPSVPLIAKFTT

SEQ ID NO: 1850 - RNA, 19 nt, synthetic construct
  source 1..19: mol_type = other RNA
  modified_base 1..2: mod_base = OTHER; note = 2'-O-methyl ribonucleotide
  modified_base 3: mod_base = OTHER; note = 2'-fluoro ribonucleotide
  modified_base 4..6: mod_base = OTHER; note = 2'-O-methyl ribonucleotide
  modified_base 7..9: mod_base = OTHER; note = 2'-fluoro ribonucleotide
  modified_base 10..11: mod_base = OTHER; note = 2'-O-methyl ribonucleotide
  modified_base 12: mod_base = OTHER; note = 2'-fluoro ribonucleotide
  modified_base 13..16: mod_base = OTHER; note = 2'-O-methyl ribonucleotide
  modified_base 17: mod_base = OTHER; note = 2'-fluoro ribonucleotide
  modified_base 18..19: mod_base = OTHER; note = 2'-O-methyl ribonucleotide
  modified_base 1..3: mod_base = OTHER; note = phosphorothioate linkage
agcaggagactggctaaaa

SEQ ID NO: 1851 - RNA, 19 nt, synthetic construct
  source 1..19: mol_type = other RNA
  modified_base 1..2: mod_base = OTHER; note = 2'-O-methyl ribonucleotide
  modified_base 3: mod_base = OTHER; note = 2'-fluoro ribonucleotide
  modified_base 4..6: mod_base = OTHER; note = 2'-O-methyl ribonucleotide
  modified_base 7..9: mod_base = OTHER; note = 2'-fluoro ribonucleotide
  modified_base 10..11: mod_base = OTHER; note = 2'-O-methyl ribonucleotide
  modified_base 12: mod_base = OTHER; note = 2'-fluoro ribonucleotide
  modified_base 13..16: mod_base = OTHER; note = 2'-O-methyl ribonucleotide
  modified_base 17: mod_base = OTHER; note = 2'-fluoro ribonucleotide
  modified_base 18..19: mod_base = OTHER; note = 2'-O-methyl ribonucleotide
  modified_base 1..3: mod_base = OTHER; note = phosphorothioate linkage
caggagactggctaaataa

SEQ ID NO: 1852-1889 - skipped (38 entries)

SEQ ID NO: 1890 - RNA, 19 nt, synthetic construct
  source 1..19: mol_type = other RNA
  modified_base 1..2: mod_base = OTHER; note = 2'-O-methyl ribonucleotide
  modified_base 3: mod_base = OTHER; note = 2'-fluoro ribonucleotide
  modified_base 4..6: mod_base = OTHER; note = 2'-O-methyl ribonucleotide
  modified_base 7..9: mod_base = OTHER; note = 2'-fluoro ribonucleotide
  modified_base 10..11: mod_base = OTHER; note = 2'-O-methyl ribonucleotide
  modified_base 12: mod_base = OTHER; note = 2'-fluoro ribonucleotide
  modified_base 13..16: mod_base = OTHER; note = 2'-O-methyl ribonucleotide
  modified_base 17: mod_base = OTHER; note = 2'-fluoro ribonucleotide
  modified_base 18..19: mod_base = OTHER; note = 2'-O-methyl ribonucleotide
  modified_base 1..3: mod_base = OTHER; note = phosphorothioate linkage
agaaacagttcaccttgaa

SEQ ID NO: 1891 - RNA, 19 nt, synthetic construct
  source 1..19: mol_type = other RNA
  modified_base 1..2: mod_base = OTHER; note = 2'-O-methyl ribonucleotide
  modified_base 3: mod_base = OTHER; note = 2'-fluoro ribonucleotide
  modified_base 4..6: mod_base = OTHER; note = 2'-O-methyl ribonucleotide
  modified_base 7..9: mod_base = OTHER; note = 2'-fluoro ribonucleotide
  modified_base 10..11: mod_base = OTHER; note = 2'-O-methyl ribonucleotide
  modified_base 12: mod_base = OTHER; note = 2'-fluoro ribonucleotide
  modified_base 13..16: mod_base = OTHER; note = 2'-O-methyl ribonucleotide
  modified_base 17: mod_base = OTHER; note = 2'-fluoro ribonucleotide
  modified_base 18..19: mod_base = OTHER; note = 2'-O-methyl ribonucleotide
  modified_base 1..3: mod_base = OTHER; note = phosphorothioate linkage
gaaacagttcaccttgaaa

SEQ ID NO: 1892 - RNA, 19 nt, synthetic construct
  source 1..19: mol_type = other RNA
  modified_base 1..2: mod_base = OTHER; note = 2'-O-methyl ribonucleotide
  modified_base 3: mod_base = OTHER; note = 2'-fluoro ribonucleotide
  modified_base 4..6: mod_base = OTHER; note = 2'-O-methyl ribonucleotide
  modified_base 7..9: mod_base = OTHER; note = 2'-fluoro ribonucleotide
  modified_base 10..11: mod_base = OTHER; note = 2'-O-methyl ribonucleotide
  modified_base 12: mod_base = OTHER; note = 2'-fluoro ribonucleotide
  modified_base 13..16: mod_base = OTHER; note = 2'-O-methyl ribonucleotide
  modified_base 17: mod_base = OTHER; note = 2'-fluoro ribonucleotide
  modified_base 18..19: mod_base = OTHER; note = 2'-O-methyl ribonucleotide
  modified_base 1..3: mod_base = OTHER; note = phosphorothioate linkage
aacctctcacttcacccta

SEQ ID NO: 1893 - RNA, 19 nt, synthetic construct
  source 1..19: mol_type = other RNA
  modified_base 1..2: mod_base = OTHER; note = 2'-O-methyl ribonucleotide
  modified_base 3: mod_base = OTHER; note = 2'-fluoro ribonucleotide
  modified_base 4..6: mod_base = OTHER; note = 2'-O-methyl ribonucleotide
  modified_base 7..9: mod_base = OTHER; note = 2'-fluoro ribonucleotide
  modified_base 10..11: mod_base = OTHER; note = 2'-O-methyl ribonucleotide
  modified_base 12: mod_base = OTHER; note = 2'-fluoro ribonucleotide
  modified_base 13..16: mod_base = OTHER; note = 2'-O-methyl ribonucleotide
  modified_base 17: mod_base = OTHER; note = 2'-fluoro ribonucleotide
  modified_base 18..19: mod_base = OTHER; note = 2'-O-methyl ribonucleotide
  modified_base 1..3: mod_base = OTHER; note = phosphorothioate linkage
acctctcacttcaccctga

SEQ ID NO: 1894 - RNA, 19 nt, synthetic construct
  source 1..19: mol_type = other RNA
  modified_base 1..2: mod_base = OTHER; note = 2'-O-methyl ribonucleotide
  modified_base 3: mod_base = OTHER; note = 2'-fluoro ribonucleotide
  modified_base 4..6: mod_base = OTHER; note = 2'-O-methyl ribonucleotide
  modified_base 7..9: mod_base = OTHER; note = 2'-fluoro ribonucleotide
  modified_base 10..11: mod_base = OTHER; note = 2'-O-methyl ribonucleotide
  modified_base 12: mod_base = OTHER; note = 2'-fluoro ribonucleotide
  modified_base 13..16: mod_base = OTHER; note = 2'-O-methyl ribonucleotide
  modified_base 17: mod_base = OTHER; note = 2'-fluoro ribonucleotide
  modified_base 18..19: mod_base = OTHER; note = 2'-O-methyl ribonucleotide
  modified_base 1..3: mod_base = OTHER; note = phosphorothioate linkage
cctctcacttcaccctgga

SEQ ID NO: 1895 - RNA, 19 nt, synthetic construct
  source 1..19: mol_type = other RNA
  modified_base 1..2: mod_base = OTHER; note = 2'-O-methyl ribonucleotide
  modified_base 3: mod_base = OTHER; note = 2'-fluoro ribonucleotide
  modified_base 4..6: mod_base = OTHER; note = 2'-O-methyl ribonucleotide
  modified_base 7..9: mod_base = OTHER; note = 2'-fluoro ribonucleotide
  modified_base 10..11: mod_base = OTHER; note = 2'-O-methyl ribonucleotide
  modified_base 12: mod_base = OTHER; note = 2'-fluoro ribonucleotide
  modified_base 13..16: mod_base = OTHER; note = 2'-O-methyl ribonucleotide
  modified_base 17: mod_base = OTHER; note = 2'-fluoro ribonucleotide
  modified_base 18..19: mod_base = OTHER; note = 2'-O-methyl ribonucleotide
  modified_base 1..3: mod_base = OTHER; note = phosphorothioate linkage
ctctcacttcaccctggaa

SEQ ID NO: 1896 - RNA, 19 nt, synthetic construct
  source 1..19: mol_type = other RNA
  modified_base 1..2: mod_base = OTHER; note = 2'-O-methyl ribonucleotide
  modified_base 3: mod_base = OTHER; note = 2'-fluoro ribonucleotide
  modified_base 4..6: mod_base = OTHER; note = 2'-O-methyl ribonucleotide
  modified_base 7..9: mod_base = OTHER; note = 2'-fluoro ribonucleotide
  modified_base 10..11: mod_base = OTHER; note = 2'-O-methyl ribonucleotide
  modified_base 12: mod_base = OTHER; note = 2'-fluoro ribonucleotide
  modified_base 13..16: mod_base = OTHER; note = 2'-O-methyl ribonucleotide
  modified_base 17: mod_base = OTHER; note = 2'-fluoro ribonucleotide
  modified_base 18..19: mod_base = OTHER; note = 2'-O-methyl ribonucleotide
  modified_base 1..3: mod_base = OTHER; note = phosphorothioate linkage
tctcacttcaccctggaga

SEQ ID NO: 1897 - RNA, 19 nt, synthetic construct
  source 1..19: mol_type = other RNA
  modified_base 1..2: mod_base = OTHER; note = 2'-O-methyl ribonucleotide
  modified_base 3: mod_base = OTHER; note = 2'-fluoro ribonucleotide
  modified_base 4..6: mod_base = OTHER; note = 2'-O-methyl ribonucleotide
  modified_base 7..9: mod_base = OTHER; note = 2'-fluoro ribonucleotide
  modified_base 10..11: mod_base = OTHER; note = 2'-O-methyl ribonucleotide
  modified_base 12: mod_base = OTHER; note = 2'-fluoro ribonucleotide
  modified_base 13..16: mod_base = OTHER; note = 2'-O-methyl ribonucleotide
  modified_base 17: mod_base = OTHER; note = 2'-fluoro ribonucleotide
  modified_base 18..19: mod_base = OTHER; note = 2'-O-methyl ribonucleotide
  modified_base 1..3: mod_base = OTHER; note = phosphorothioate linkage
ctcacttcaccctggagca

SEQ ID NO: 1898 - RNA, 19 nt, synthetic construct
  source 1..19: mol_type = other RNA
  modified_base 1..2: mod_base = OTHER; note = 2'-O-methyl ribonucleotide
  modified_base 3: mod_base = OTHER; note = 2'-fluoro ribonucleotide
  modified_base 4..6: mod_base = OTHER; note = 2'-O-methyl ribonucleotide
  modified_base 7..9: mod_base = OTHER; note = 2'-fluoro ribonucleotide
  modified_base 10..11: mod_base = OTHER; note = 2'-O-methyl ribonucleotide
  modified_base 12: mod_base = OTHER; note = 2'-fluoro ribonucleotide
  modified_base 13..16: mod_base = OTHER; note = 2'-O-methyl ribonucleotide
  modified_base 17: mod_base = OTHER; note = 2'-fluoro ribonucleotide
  modified_base 18..19: mod_base = OTHER; note = 2'-O-methyl ribonucleotide
  modified_base 1..3: mod_base = OTHER; note = phosphorothioate linkage
tcacttcaccctggagcca

SEQ ID NO: 1899 - RNA, 19 nt, synthetic construct
  source 1..19: mol_type = other RNA
  modified_base 1..2: mod_base = OTHER; note = 2'-O-methyl ribonucleotide
  modified_base 3: mod_base = OTHER; note = 2'-fluoro ribonucleotide
  modified_base 4..6: mod_base = OTHER; note = 2'-O-methyl ribonucleotide
  modified_base 7..9: mod_base = OTHER; note = 2'-fluoro ribonucleotide
  modified_base 10..11: mod_base = OTHER; note = 2'-O-methyl ribonucleotide
  modified_base 12: mod_base = OTHER; note = 2'-fluoro ribonucleotide
  modified_base 13..16: mod_base = OTHER; note = 2'-O-methyl ribonucleotide
  modified_base 17: mod_base = OTHER; note = 2'-fluoro ribonucleotide
  modified_base 18..19: mod_base = OTHER; note = 2'-O-methyl ribonucleotide
  modified_base 1..3: mod_base = OTHER; note = phosphorothioate linkage
cacttcaccctggagccca

SEQ ID NO: 1900 - RNA, 19 nt, synthetic construct
  source 1..19: mol_type = other RNA
  modified_base 1..2: mod_base = OTHER; note = 2'-O-methyl ribonucleotide
  modified_base 3: mod_base = OTHER; note = 2'-fluoro ribonucleotide
  modified_base 4..6: mod_base = OTHER; note = 2'-O-methyl ribonucleotide
  modified_base 7..9: mod_base = OTHER; note = 2'-fluoro ribonucleotide
  modified_base 10..11: mod_base = OTHER; note = 2'-O-methyl ribonucleotide
  modified_base 12: mod_base = OTHER; note = 2'-fluoro ribonucleotide
  modified_base 13..16: mod_base = OTHER; note = 2'-O-methyl ribonucleotide
  modified_base 17: mod_base = OTHER; note = 2'-fluoro ribonucleotide
  modified_base 18..19: mod_base = OTHER; note = 2'-O-methyl ribonucleotide
  modified_base 1..3: mod_base = OTHER; note = phosphorothioate linkage
acttcaccctggagcccaa

SEQ ID NO: 1901 - RNA, 19 nt, synthetic construct
  source 1..19: mol_type = other RNA
  modified_base 1..2: mod_base = OTHER; note = 2'-O-methyl ribonucleotide
  modified_base 3: mod_base = OTHER; note = 2'-fluoro ribonucleotide
  modified_base 4..6: mod_base = OTHER; note = 2'-O-methyl ribonucleotide
  modified_base 7..9: mod_base = OTHER; note = 2'-fluoro ribonucleotide
  modified_base 10..11: mod_base = OTHER; note = 2'-O-methyl ribonucleotide
  modified_base 12: mod_base = OTHER; note = 2'-fluoro ribonucleotide
  modified_base 13..16: mod_base = OTHER; note = 2'-O-methyl ribonucleotide
  modified_base 17: mod_base = OTHER; note = 2'-fluoro ribonucleotide
  modified_base 18..19: mod_base = OTHER; note = 2'-O-methyl ribonucleotide
  modified_base 1..3: mod_base = OTHER; note = phosphorothioate linkage
cttcaccctggagcccata

SEQ ID NO: 1902 - RNA, 19 nt, synthetic construct
  source 1..19: mol_type = other RNA
  modified_base 1..2: mod_base = OTHER; note = 2'-O-methyl ribonucleotide
  modified_base 3: mod_base = OTHER; note = 2'-fluoro ribonucleotide
  modified_base 4..6: mod_base = OTHER; note = 2'-O-methyl ribonucleotide
  modified_base 7..9: mod_base = OTHER; note = 2'-fluoro ribonucleotide
  modified_base 10..11: mod_base = OTHER; note = 2'-O-methyl ribonucleotide
  modified_base 12: mod_base = OTHER; note = 2'-fluoro ribonucleotide
  modified_base 13..16: mod_base = OTHER; note = 2'-O-methyl ribonucleotide
  modified_base 17: mod_base = OTHER; note = 2'-fluoro ribonucleotide
  modified_base 18..19: mod_base = OTHER; note = 2'-O-methyl ribonucleotide
  modified_base 1..3: mod_base = OTHER; note = phosphorothioate linkage
ttcaccctggagcccatca

SEQ ID NO: 1903 - RNA, 19 nt, synthetic construct
  source 1..19: mol_type = other RNA
  modified_base 1..2: mod_base = OTHER; note = 2'-O-methyl ribonucleotide
  modified_base 3: mod_base = OTHER; note = 2'-fluoro ribonucleotide
  modified_base 4..6: mod_base = OTHER; note = 2'-O-methyl ribonucleotide
  modified_base 7..9: mod_base = OTHER; note = 2'-fluoro ribonucleotide
  modified_base 10..11: mod_base = OTHER; note = 2'-O-methyl ribonucleotide
  modified_base 12: mod_base = OTHER; note = 2'-fluoro ribonucleotide
  modified_base 13..16: mod_base = OTHER; note = 2'-O-methyl ribonucleotide
  modified_base 17: mod_base = OTHER; note = 2'-fluoro ribonucleotide
  modified_base 18..19: mod_base = OTHER; note = 2'-O-methyl ribonucleotide
  modified_base 1..3: mod_base = OTHER; note = phosphorothioate linkage
tcaccctggagcccatcca

SEQ ID NO: 1904 - RNA, 19 nt, synthetic construct
  source 1..19: mol_type = other RNA
  modified_base 1..2: mod_base = OTHER; note = 2'-O-methyl ribonucleotide
  modified_base 3: mod_base = OTHER; note = 2'-fluoro ribonucleotide
  modified_base 4..6: mod_base = OTHER; note = 2'-O-methyl ribonucleotide
  modified_base 7..9: mod_base = OTHER; note = 2'-fluoro ribonucleotide
  modified_base 10..11: mod_base = OTHER; note = 2'-O-methyl ribonucleotide
  modified_base 12: mod_base = OTHER; note = 2'-fluoro ribonucleotide
  modified_base 13..16: mod_base = OTHER; note = 2'-O-methyl ribonucleotide
  modified_base 17: mod_base = OTHER; note = 2'-fluoro ribonucleotide
  modified_base 18..19: mod_base = OTHER; note = 2'-O-methyl ribonucleotide
  modified_base 1..3: mod_base = OTHER; note = phosphorothioate linkage
caccctggagcccatccaa

SEQ ID NO: 1905 - RNA, 19 nt, synthetic construct
  source 1..19: mol_type = other RNA
  modified_base 1..2: mod_base = OTHER; note = 2'-O-methyl ribonucleotide
  modified_base 3: mod_base = OTHER; note = 2'-fluoro ribonucleotide
  modified_base 4..6: mod_base = OTHER; note = 2'-O-methyl ribonucleotide
  modified_base 7..9: mod_base = OTHER; note = 2'-fluoro ribonucleotide
  modified_base 10..11: mod_base = OTHER; note = 2'-O-methyl ribonucleotide
  modified_base 12: mod_base = OTHER; note = 2'-fluoro ribonucleotide
  modified_base 13..16: mod_base = OTHER; note = 2'-O-methyl ribonucleotide
  modified_base 17: mod_base = OTHER; note = 2'-fluoro ribonucleotide
  modified_base 18..19: mod_base = OTHER; note = 2'-O-methyl ribonucleotide
  modified_base 1..3: mod_base = OTHER; note = phosphorothioate linkage
accctggagcccatccaga

SEQ ID NO: 1906 - RNA, 19 nt, synthetic construct
  source 1..19: mol_type = other RNA
  modified_base 1..2: mod_base = OTHER; note = 2'-O-methyl ribonucleotide
  modified_base 3: mod_base = OTHER; note = 2'-fluoro ribonucleotide
  modified_base 4..6: mod_base = OTHER; note = 2'-O-methyl ribonucleotide
  modified_base 7..9: mod_base = OTHER; note = 2'-fluoro ribonucleotide
  modified_base 10..11: mod_base = OTHER; note = 2'-O-methyl ribonucleotide
  modified_base 12: mod_base = OTHER; note = 2'-fluoro ribonucleotide
  modified_base 13..16: mod_base = OTHER; note = 2'-O-methyl ribonucleotide
  modified_base 17: mod_base = OTHER; note = 2'-fluoro ribonucleotide
  modified_base 18..19: mod_base = OTHER; note = 2'-O-methyl ribonucleotide
  modified_base 1..3: mod_base = OTHER; note = phosphorothioate linkage
ccctggagcccatccagta

SEQ ID NO: 1907 - RNA, 19 nt, synthetic construct
  source 1..19: mol_type = other RNA
  modified_base 1..2: mod_base = OTHER; note = 2'-O-methyl ribonucleotide
  modified_base 3: mod_base = OTHER; note = 2'-fluoro ribonucleotide
  modified_base 4..6: mod_base = OTHER; note = 2'-O-methyl ribonucleotide
  modified_base 7..9: mod_base = OTHER; note = 2'-fluoro ribonucleotide
  modified_base 10..11: mod_base = OTHER; note = 2'-O-methyl ribonucleotide
  modified_base 12: mod_base = OTHER; note = 2'-fluoro ribonucleotide
  modified_base 13..16: mod_base = OTHER; note = 2'-O-methyl ribonucleotide
  modified_base 17: mod_base = OTHER; note = 2'-fluoro ribonucleotide
  modified_base 18..19: mod_base = OTHER; note = 2'-O-methyl ribonucleotide
  modified_base 1..3: mod_base = OTHER; note = phosphorothioate linkage
cctggagcccatccagtca

SEQ ID NO: 1908 - RNA, 19 nt, synthetic construct
  source 1..19: mol_type = other RNA
  modified_base 1..2: mod_base = OTHER; note = 2'-O-methyl ribonucleotide
  modified_base 3: mod_base = OTHER; note = 2'-fluoro ribonucleotide
  modified_base 4..6: mod_base = OTHER; note = 2'-O-methyl ribonucleotide
  modified_base 7..9: mod_base = OTHER; note = 2'-fluoro ribonucleotide
  modified_base 10..11: mod_base = OTHER; note = 2'-O-methyl ribonucleotide
  modified_base 12: mod_base = OTHER; note = 2'-fluoro ribonucleotide
  modified_base 13..16: mod_base = OTHER; note = 2'-O-methyl ribonucleotide
  modified_base 17: mod_base = OTHER; note = 2'-fluoro ribonucleotide
  modified_base 18..19: mod_base = OTHER; note = 2'-O-methyl ribonucleotide
  modified_base 1..3: mod_base = OTHER; note = phosphorothioate linkage
ctggagcccatccagtcta

SEQ ID NO: 1909 - RNA, 19 nt, synthetic construct
  source 1..19: mol_type = other RNA
  modified_base 1..2: mod_base = OTHER; note = 2'-O-methyl ribonucleotide
  modified_base 3: mod_base = OTHER; note = 2'-fluoro ribonucleotide
  modified_base 4..6: mod_base = OTHER; note = 2'-O-methyl ribonucleotide
  modified_base 7..9: mod_base = OTHER; note = 2'-fluoro ribonucleotide
  modified_base 10..11: mod_base = OTHER; note = 2'-O-methyl ribonucleotide
  modified_base 12: mod_base = OTHER; note = 2'-fluoro ribonucleotide
  modified_base 13..16: mod_base = OTHER; note = 2'-O-methyl ribonucleotide
  modified_base 17: mod_base = OTHER; note = 2'-fluoro ribonucleotide
  modified_base 18..19: mod_base = OTHER; note = 2'-O-methyl ribonucleotide
  modified_base 1..3: mod_base = OTHER; note = phosphorothioate linkage
ctgcttaactgtccatcaa

SEQ ID NO: 1910 - RNA, 19 nt, synthetic construct
  source 1..19: mol_type = other RNA
  modified_base 1..2: mod_base = OTHER; note = 2'-O-methyl ribonucleotide
  modified_base 3: mod_base = OTHER; note = 2'-fluoro ribonucleotide
  modified_base 4..6: mod_base = OTHER; note = 2'-O-methyl ribonucleotide
  modified_base 7..9: mod_base = OTHER; note = 2'-fluoro ribonucleotide
  modified_base 10..11: mod_base = OTHER; note = 2'-O-methyl ribonucleotide
  modified_base 12: mod_base = OTHER; note = 2'-fluoro ribonucleotide
  modified_base 13..16: mod_base = OTHER; note = 2'-O-methyl ribonucleotide
  modified_base 17: mod_base = OTHER; note = 2'-fluoro ribonucleotide
  modified_base 18..19: mod_base = OTHER; note = 2'-O-methyl ribonucleotide
  modified_base 1..3: mod_base = OTHER; note = phosphorothioate linkage
tgcttaactgtccatcaga

SEQ ID NO: 1911 - RNA, 19 nt, synthetic construct
  source 1..19: mol_type = other RNA
  modified_base 1..2: mod_base = OTHER; note = 2'-O-methyl ribonucleotide
  modified_base 3: mod_base = OTHER; note = 2'-fluoro ribonucleotide
  modified_base 4..6: mod_base = OTHER; note = 2'-O-methyl ribonucleotide
  modified_base 7..9: mod_base = OTHER; note = 2'-fluoro ribonucleotide
  modified_base 10..11: mod_base = OTHER; note = 2'-O-methyl ribonucleotide
  modified_base 12: mod_base = OTHER; note = 2'-fluoro ribonucleotide
  modified_base 13..16: mod_base = OTHER; note = 2'-O-methyl ribonucleotide
  modified_base 17: mod_base = OTHER; note = 2'-fluoro ribonucleotide
  modified_base 18..19: mod_base = OTHER; note = 2'-O-methyl ribonucleotide
  modified_base 1..3: mod_base = OTHER; note = phosphorothioate linkage
gcttaactgtccatcagca

SEQ ID NO: 1912 - RNA, 19 nt, synthetic construct
  source 1..19: mol_type = other RNA
  modified_base 1..2: mod_base = OTHER; note = 2'-O-methyl ribonucleotide
  modified_base 3: mod_base = OTHER; note = 2'-fluoro ribonucleotide
  modified_base 4..6: mod_base = OTHER; note = 2'-O-methyl ribonucleotide
  modified_base 7..9: mod_base = OTHER; note = 2'-fluoro ribonucleotide
  modified_base 10..11: mod_base = OTHER; note = 2'-O-methyl ribonucleotide
  modified_base 12: mod_base = OTHER; note = 2'-fluoro ribonucleotide
  modified_base 13..16: mod_base = OTHER; note = 2'-O-methyl ribonucleotide
  modified_base 17: mod_base = OTHER; note = 2'-fluoro ribonucleotide
  modified_base 18..19: mod_base = OTHER; note = 2'-O-methyl ribonucleotide
  modified_base 1..3: mod_base = OTHER; note = phosphorothioate linkage
cttaactgtccatcagcaa

SEQ ID NO: 1913 - RNA, 19 nt, synthetic construct
  source 1..19: mol_type = other RNA
  modified_base 1..2: mod_base = OTHER; note = 2'-O-methyl ribonucleotide
  modified_base 3: mod_base = OTHER; note = 2'-fluoro ribonucleotide
  modified_base 4..6: mod_base = OTHER; note = 2'-O-methyl ribonucleotide
  modified_base 7..9: mod_base = OTHER; note = 2'-fluoro ribonucleotide
  modified_base 10..11: mod_base = OTHER; note = 2'-O-methyl ribonucleotide
  modified_base 12: mod_base = OTHER; note = 2'-fluoro ribonucleotide
  modified_base 13..16: mod_base = OTHER; note = 2'-O-methyl ribonucleotide
  modified_base 17: mod_base = OTHER; note = 2'-fluoro ribonucleotide
  modified_base 18..19: mod_base = OTHER; note = 2'-O-methyl ribonucleotide
  modified_base 1..3: mod_base = OTHER; note = phosphorothioate linkage
ttaactgtccatcagcaga

SEQ ID NO: 1914 - RNA, 19 nt, synthetic construct
  source 1..19: mol_type = other RNA
  modified_base 1..2: mod_base = OTHER; note = 2'-O-methyl ribonucleotide
  modified_base 3: mod_base = OTHER; note = 2'-fluoro ribonucleotide
  modified_base 4..6: mod_base = OTHER; note = 2'-O-methyl ribonucleotide
  modified_base 7..9: mod_base = OTHER; note = 2'-fluoro ribonucleotide
  modified_base 10..11: mod_base = OTHER; note = 2'-O-methyl ribonucleotide
  modified_base 12: mod_base = OTHER; note = 2'-fluoro ribonucleotide
  modified_base 13..16: mod_base = OTHER; note = 2'-O-methyl ribonucleotide
  modified_base 17: mod_base = OTHER; note = 2'-fluoro ribonucleotide
  modified_base 18..19: mod_base = OTHER; note = 2'-O-methyl ribonucleotide
  modified_base 1..3: mod_base = OTHER; note = phosphorothioate linkage
aactgtccatcagcaggaa

SEQ ID NO: 1915 - RNA, 19 nt, synthetic construct
  source 1..19: mol_type = other RNA
  modified_base 1..2: mod_base = OTHER; note = 2'-O-methyl ribonucleotide
  modified_base 3: mod_base = OTHER; note = 2'-fluoro ribonucleotide
  modified_base 4..6: mod_base = OTHER; note = 2'-O-methyl ribonucleotide
  modified_base 7..9: mod_base = OTHER; note = 2'-fluoro ribonucleotide
  modified_base 10..11: mod_base = OTHER; note = 2'-O-methyl ribonucleotide
  modified_base 12: mod_base = OTHER; note = 2'-fluoro ribonucleotide
  modified_base 13..16: mod_base = OTHER; note = 2'-O-methyl ribonucleotide
  modified_base 17: mod_base = OTHER; note = 2'-fluoro ribonucleotide
  modified_base 18..19: mod_base = OTHER; note = 2'-O-methyl ribonucleotide
  modified_base 1..3: mod_base = OTHER; note = phosphorothioate linkage
actgtccatcagcaggaga

SEQ ID NO: 1916 - RNA, 19 nt, synthetic construct
  source 1..19: mol_type = other RNA
  modified_base 1..2: mod_base = OTHER; note = 2'-O-methyl ribonucleotide
  modified_base 3: mod_base = OTHER; note = 2'-fluoro ribonucleotide
  modified_base 4..6: mod_base = OTHER; note = 2'-O-methyl ribonucleotide
  modified_base 7..9: mod_base = OTHER; note = 2'-fluoro ribonucleotide
  modified_base 10..11: mod_base = OTHER; note = 2'-O-methyl ribonucleotide
  modified_base 12: mod_base = OTHER; note = 2'-fluoro ribonucleotide
  modified_base 13..16: mod_base = OTHER; note = 2'-O-methyl ribonucleotide
  modified_base 17: mod_base = OTHER; note = 2'-fluoro ribonucleotide
  modified_base 18..19: mod_base = OTHER; note = 2'-O-methyl ribonucleotide
  modified_base 1..3: mod_base = OTHER; note = phosphorothioate linkage
ctgtccatcagcaggagaa

SEQ ID NO: 1917 - RNA, 19 nt, synthetic construct
  source 1..19: mol_type = other RNA
  modified_base 1..2: mod_base = OTHER; note = 2'-O-methyl ribonucleotide
  modified_base 3: mod_base = OTHER; note = 2'-fluoro ribonucleotide
  modified_base 4..6: mod_base = OTHER; note = 2'-O-methyl ribonucleotide
  modified_base 7..9: mod_base = OTHER; note = 2'-fluoro ribonucleotide
  modified_base 10..11: mod_base = OTHER; note = 2'-O-methyl ribonucleotide
  modified_base 12: mod_base = OTHER; note = 2'-fluoro ribonucleotide
  modified_base 13..16: mod_base = OTHER; note = 2'-O-methyl ribonucleotide
  modified_base 17: mod_base = OTHER; note = 2'-fluoro ribonucleotide
  modified_base 18..19: mod_base = OTHER; note = 2'-O-methyl ribonucleotide
  modified_base 1..3: mod_base = OTHER; note = phosphorothioate linkage
gtccatcagcaggagacta

SEQ ID NO: 1918 - RNA, 19 nt, synthetic construct
  source 1..19: mol_type = other RNA
  modified_base 1..2: mod_base = OTHER; note = 2'-O-methyl ribonucleotide
  modified_base 3: mod_base = OTHER; note = 2'-fluoro ribonucleotide
  modified_base 4..6: mod_base = OTHER; note = 2'-O-methyl ribonucleotide
  modified_base 7..9: mod_base = OTHER; note = 2'-fluoro ribonucleotide
  modified_base 10..11: mod_base = OTHER; note = 2'-O-methyl ribonucleotide
  modified_base 12: mod_base = OTHER; note = 2'-fluoro ribonucleotide
  modified_base 13..16: mod_base = OTHER; note = 2'-O-methyl ribonucleotide
  modified_base 17: mod_base = OTHER; note = 2'-fluoro ribonucleotide
  modified_base 18..19: mod_base = OTHER; note = 2'-O-methyl ribonucleotide
  modified_base 1..3: mod_base = OTHER; note = phosphorothioate linkage
tccatcagcaggagactga

SEQ ID NO: 1919 - RNA, 19 nt, synthetic construct
  source 1..19: mol_type = other RNA
  modified_base 1..2: mod_base = OTHER; note = 2'-O-methyl ribonucleotide
  modified_base 3: mod_base = OTHER; note = 2'-fluoro ribonucleotide
  modified_base 4..6: mod_base = OTHER; note = 2'-O-methyl ribonucleotide
  modified_base 7..9: mod_base = OTHER; note = 2'-fluoro ribonucleotide
  modified_base 10..11: mod_base = OTHER; note = 2'-O-methyl ribonucleotide
  modified_base 12: mod_base = OTHER; note = 2'-fluoro ribonucleotide
  modified_base 13..16: mod_base = OTHER; note = 2'-O-methyl ribonucleotide
  modified_base 17: mod_base = OTHER; note = 2'-fluoro ribonucleotide
  modified_base 18..19: mod_base = OTHER; note = 2'-O-methyl ribonucleotide
  modified_base 1..3: mod_base = OTHER; note = phosphorothioate linkage
atcagcaggagactggcta

SEQ ID NO: 1920 - RNA, 19 nt, synthetic construct
  source 1..19: mol_type = other RNA
  modified_base 1..2: mod_base = OTHER; note = 2'-O-methyl ribonucleotide
  modified_base 3: mod_base = OTHER; note = 2'-fluoro ribonucleotide
  modified_base 4..6: mod_base = OTHER; note = 2'-O-methyl ribonucleotide
  modified_base 7..9: mod_base = OTHER; note = 2'-fluoro ribonucleotide
  modified_base 10..11: mod_base = OTHER; note = 2'-O-methyl ribonucleotide
  modified_base 12: mod_base = OTHER; note = 2'-fluoro ribonucleotide
  modified_base 13..16: mod_base = OTHER; note = 2'-O-methyl ribonucleotide
  modified_base 17: mod_base = OTHER; note = 2'-fluoro ribonucleotide
  modified_base 18..19: mod_base = OTHER; note = 2'-O-methyl ribonucleotide
  modified_base 1..3: mod_base = OTHER; note = phosphorothioate linkage
tcagcaggagactggctaa

SEQ ID NO: 1921 - RNA, 19 nt, synthetic construct
  source 1..19: mol_type = other RNA
  modified_base 1..2: mod_base = OTHER; note = 2'-O-methyl ribonucleotide
  modified_base 3: mod_base = OTHER; note = 2'-fluoro ribonucleotide
  modified_base 4..6: mod_base = OTHER; note = 2'-O-methyl ribonucleotide
  modified_base 7..9: mod_base = OTHER; note = 2'-fluoro ribonucleotide
  modified_base 10..11: mod_base = OTHER; note = 2'-O-methyl ribonucleotide
  modified_base 12: mod_base = OTHER; note = 2'-fluoro ribonucleotide
  modified_base 13..16: mod_base = OTHER; note = 2'-O-methyl ribonucleotide
  modified_base 17: mod_base = OTHER; note = 2'-fluoro ribonucleotide
  modified_base 18..19: mod_base = OTHER; note = 2'-O-methyl ribonucleotide
  modified_base 1..3: mod_base = OTHER; note = phosphorothioate linkage
ggagactggctaaataaaa

SEQ ID NO: 1922 - RNA, 19 nt, synthetic construct
  source 1..19: mol_type = other RNA
  modified_base 1..2: mod_base = OTHER; note = 2'-O-methyl ribonucleotide
  modified_base 3: mod_base = OTHER; note = 2'-fluoro ribonucleotide
  modified_base 4..6: mod_base = OTHER; note = 2'-O-methyl ribonucleotide
  modified_base 7..9: mod_base = OTHER; note = 2'-fluoro ribonucleotide
  modified_base 10..11: mod_base = OTHER; note = 2'-O-methyl ribonucleotide
  modified_base 12: mod_base = OTHER; note = 2'-fluoro ribonucleotide
  modified_base 13..16: mod_base = OTHER; note = 2'-O-methyl ribonucleotide
  modified_base 17: mod_base = OTHER; note = 2'-fluoro ribonucleotide
  modified_base 18..19: mod_base = OTHER; note = 2'-O-methyl ribonucleotide
  modified_base 1..3: mod_base = OTHER; note = phosphorothioate linkage
gactggctaaataaaatta

SEQ ID NO: 1923 - RNA, 19 nt, synthetic construct
  source 1..19: mol_type = other RNA
  modified_base 1..2: mod_base = OTHER; note = 2'-O-methyl ribonucleotide
  modified_base 3: mod_base = OTHER; note = 2'-fluoro ribonucleotide
  modified_base 4..6: mod_base = OTHER; note = 2'-O-methyl ribonucleotide
  modified_base 7..9: mod_base = OTHER; note = 2'-fluoro ribonucleotide
  modified_base 10..11: mod_base = OTHER; note = 2'-O-methyl ribonucleotide
  modified_base 12: mod_base = OTHER; note = 2'-fluoro ribonucleotide
  modified_base 13..16: mod_base = OTHER; note = 2'-O-methyl ribonucleotide
  modified_base 17: mod_base = OTHER; note = 2'-fluoro ribonucleotide
  modified_base 18..19: mod_base = OTHER; note = 2'-O-methyl ribonucleotide
  modified_base 1..3: mod_base = OTHER; note = phosphorothioate linkage
ctggctaaataaaattaga

SEQ ID NO: 1924 - RNA, 19 nt, synthetic construct
  source 1..19: mol_type = other RNA
  modified_base 1..2: mod_base = OTHER; note = 2'-O-methyl ribonucleotide
  modified_base 3: mod_base = OTHER; note = 2'-fluoro ribonucleotide
  modified_base 4..6: mod_base = OTHER; note = 2'-O-methyl ribonucleotide
  modified_base 7..9: mod_base = OTHER; note = 2'-fluoro ribonucleotide
  modified_base 10..11: mod_base = OTHER; note = 2'-O-methyl ribonucleotide
  modified_base 12: mod_base = OTHER; note = 2'-fluoro ribonucleotide
  modified_base 13..16: mod_base = OTHER; note = 2'-O-methyl ribonucleotide
  modified_base 17: mod_base = OTHER; note = 2'-fluoro ribonucleotide
  modified_base 18..19: mod_base = OTHER; note = 2'-O-methyl ribonucleotide
  modified_base 1..3: mod_base = OTHER; note = phosphorothioate linkage
tggctaaataaaattagaa

SEQ ID NO: 1925 - RNA, 19 nt, synthetic construct
  source 1..19: mol_type = other RNA
  modified_base 1..2: mod_base = OTHER; note = 2'-O-methyl ribonucleotide
  modified_base 3: mod_base = OTHER; note = 2'-fluoro ribonucleotide
  modified_base 4..6: mod_base = OTHER; note = 2'-O-methyl ribonucleotide
  modified_base 7..9: mod_base = OTHER; note = 2'-fluoro ribonucleotide
  modified_base 10..11: mod_base = OTHER; note = 2'-O-methyl ribonucleotide
  modified_base 12: mod_base = OTHER; note = 2'-fluoro ribonucleotide
  modified_base 13..16: mod_base = OTHER; note = 2'-O-methyl ribonucleotide
  modified_base 17: mod_base = OTHER; note = 2'-fluoro ribonucleotide
  modified_base 18..19: mod_base = OTHER; note = 2'-O-methyl ribonucleotide
  modified_base 1..3: mod_base = OTHER; note = phosphorothioate linkage
ggctaaataaaattagaaa

SEQ ID NO: 1926 - RNA, 19 nt, synthetic construct
  source 1..19: mol_type = other RNA
  modified_base 1..2: mod_base = OTHER; note = 2'-O-methyl ribonucleotide
  modified_base 3: mod_base = OTHER; note = 2'-fluoro ribonucleotide
  modified_base 4..6: mod_base = OTHER; note = 2'-O-methyl ribonucleotide
  modified_base 7..9: mod_base = OTHER; note = 2'-fluoro ribonucleotide
  modified_base 10..11: mod_base = OTHER; note = 2'-O-methyl ribonucleotide
  modified_base 12: mod_base = OTHER; note = 2'-fluoro ribonucleotide
  modified_base 13..16: mod_base = OTHER; note = 2'-O-methyl ribonucleotide
  modified_base 17: mod_base = OTHER; note = 2'-fluoro ribonucleotide
  modified_base 18..19: mod_base = OTHER; note = 2'-O-methyl ribonucleotide
  modified_base 1..3: mod_base = OTHER; note = phosphorothioate linkage
gctaaataaaattagaata

SEQ ID NO: 1927 - RNA, 19 nt, synthetic construct
  source 1..19: mol_type = other RNA
  modified_base 1..2: mod_base = OTHER; note = 2'-O-methyl ribonucleotide
  modified_base 3: mod_base = OTHER; note = 2'-fluoro ribonucleotide
  modified_base 4..6: mod_base = OTHER; note = 2'-O-methyl ribonucleotide
  modified_base 7..9: mod_base = OTHER; note = 2'-fluoro ribonucleotide
  modified_base 10..11: mod_base = OTHER; note = 2'-O-methyl ribonucleotide
  modified_base 12: mod_base = OTHER; note = 2'-fluoro ribonucleotide
  modified_base 13..16: mod_base = OTHER; note = 2'-O-methyl ribonucleotide
  modified_base 17: mod_base = OTHER; note = 2'-fluoro ribonucleotide
  modified_base 18..19: mod_base = OTHER; note = 2'-O-methyl ribonucleotide
  modified_base 1..3: mod_base = OTHER; note = phosphorothioate linkage
aaataaaattagaatataa

SEQ ID NO: 1928 - RNA, 19 nt, synthetic construct
  source 1..19: mol_type = other RNA
  modified_base 1..2: mod_base = OTHER; note = 2'-O-methyl ribonucleotide
  modified_base 3: mod_base = OTHER; note = 2'-fluoro ribonucleotide
  modified_base 4..6: mod_base = OTHER; note = 2'-O-methyl ribonucleotide
  modified_base 7..9: mod_base = OTHER; note = 2'-fluoro ribonucleotide
  modified_base 10..11: mod_base = OTHER; note = 2'-O-methyl ribonucleotide
  modified_base 12: mod_base = OTHER; note = 2'-fluoro ribonucleotide
  modified_base 13..16: mod_base = OTHER; note = 2'-O-methyl ribonucleotide
  modified_base 17: mod_base = OTHER; note = 2'-fluoro ribonucleotide
  modified_base 18..19: mod_base = OTHER; note = 2'-O-methyl ribonucleotide
  modified_base 1..3: mod_base = OTHER; note = phosphorothioate linkage
ataaaattagaatatatta

SEQ ID NO: 1929-1931 - skipped (3 entries)

SEQ ID NO: 1932 - RNA, 19 nt, synthetic construct
  source 1..19: mol_type = other RNA
  modified_base 1..2: mod_base = OTHER; note = 2'-O-methyl ribonucleotide
  modified_base 3: mod_base = OTHER; note = 2'-fluoro ribonucleotide
  modified_base 4..6: mod_base = OTHER; note = 2'-O-methyl ribonucleotide
  modified_base 7..9: mod_base = OTHER; note = 2'-fluoro ribonucleotide
  modified_base 10..11: mod_base = OTHER; note = 2'-O-methyl ribonucleotide
  modified_base 12: mod_base = OTHER; note = 2'-fluoro ribonucleotide
  modified_base 13..16: mod_base = OTHER; note = 2'-O-methyl ribonucleotide
  modified_base 17: mod_base = OTHER; note = 2'-fluoro ribonucleotide
  modified_base 18..19: mod_base = OTHER; note = 2'-O-methyl ribonucleotide
  modified_base 1..3: mod_base = OTHER; note = phosphorothioate linkage
gagtcgcatctcagtgcaa

SEQ ID NO: 1933 - RNA, 19 nt, synthetic construct
  source 1..19: mol_type = other RNA
  modified_base 1..2: mod_base = OTHER; note = 2'-O-methyl ribonucleotide
  modified_base 3: mod_base = OTHER; note = 2'-fluoro ribonucleotide
  modified_base 4..6: mod_base = OTHER; note = 2'-O-methyl ribonucleotide
  modified_base 7..9: mod_base = OTHER; note = 2'-fluoro ribonucleotide
  modified_base 10..11: mod_base = OTHER; note = 2'-O-methyl ribonucleotide
  modified_base 12: mod_base = OTHER; note = 2'-fluoro ribonucleotide
  modified_base 13..16: mod_base = OTHER; note = 2'-O-methyl ribonucleotide
  modified_base 17: mod_base = OTHER; note = 2'-fluoro ribonucleotide
  modified_base 18..19: mod_base = OTHER; note = 2'-O-methyl ribonucleotide
  modified_base 1..3: mod_base = OTHER; note = phosphorothioate linkage
gtcgcatctcagtgcagga

SEQ ID NO: 1934 - RNA, 19 nt, synthetic construct
  source 1..19: mol_type = other RNA
  modified_base 1..2: mod_base = OTHER; note = 2'-O-methyl ribonucleotide
  modified_base 3: mod_base = OTHER; note = 2'-fluoro ribonucleotide
  modified_base 4..6: mod_base = OTHER; note = 2'-O-methyl ribonucleotide
  modified_base 7..9: mod_base = OTHER; note = 2'-fluoro ribonucleotide
  modified_base 10..11: mod_base = OTHER; note = 2'-O-methyl ribonucleotide
  modified_base 12: mod_base = OTHER; note = 2'-fluoro ribonucleotide
  modified_base 13..16: mod_base = OTHER; note = 2'-O-methyl ribonucleotide
  modified_base 17: mod_base = OTHER; note = 2'-fluoro ribonucleotide
  modified_base 18..19: mod_base = OTHER; note = 2'-O-methyl ribonucleotide
  modified_base 1..3: mod_base = OTHER; note = phosphorothioate linkage
agaacctctcacttcacca

SEQ ID NO: 1935 - RNA, 19 nt, synthetic construct
  source 1..19: mol_type = other RNA
  modified_base 1..2: mod_base = OTHER; note = 2'-O-methyl ribonucleotide
  modified_base 3: mod_base = OTHER; note = 2'-fluoro ribonucleotide
  modified_base 4..6: mod_base = OTHER; note = 2'-O-methyl ribonucleotide
  modified_base 7..9: mod_base = OTHER; note = 2'-fluoro ribonucleotide
  modified_base 10..11: mod_base = OTHER; note = 2'-O-methyl ribonucleotide
  modified_base 12: mod_base = OTHER; note = 2'-fluoro ribonucleotide
  modified_base 13..16: mod_base = OTHER; note = 2'-O-methyl ribonucleotide
  modified_base 17: mod_base = OTHER; note = 2'-fluoro ribonucleotide
  modified_base 18..19: mod_base = OTHER; note = 2'-O-methyl ribonucleotide
  modified_base 1..3: mod_base = OTHER; note = phosphorothioate linkage
gcaggagactggctaaata

SEQ ID NO: 1936 - RNA, 19 nt, synthetic construct
  source 1..19: mol_type = other RNA
  modified_base 1..2: mod_base = OTHER; note = 2'-O-methyl ribonucleotide
  modified_base 3: mod_base = OTHER; note = 2'-fluoro ribonucleotide
  modified_base 4..6: mod_base = OTHER; note = 2'-O-methyl ribonucleotide
  modified_base 7..9: mod_base = OTHER; note = 2'-fluoro ribonucleotide
  modified_base 10..11: mod_base = OTHER; note = 2'-O-methyl ribonucleotide
  modified_base 12: mod_base = OTHER; note = 2'-fluoro ribonucleotide
  modified_base 13..16: mod_base = OTHER; note = 2'-O-methyl ribonucleotide
  modified_base 17: mod_base = OTHER; note = 2'-fluoro ribonucleotide
  modified_base 18..19: mod_base = OTHER; note = 2'-O-methyl ribonucleotide
  modified_base 1..3: mod_base = OTHER; note = phosphorothioate linkage
aacagtacctaataaacaa

SEQ ID NO: 1937 - RNA, 19 nt, synthetic construct
  source 1..19: mol_type = other RNA
  modified_base 1: mod_base = OTHER; note = 2'-fluoro ribonucleotide
  modified_base 2: mod_base = OTHER; note = 2'-O-methyl ribonucleotide
  modified_base 3: mod_base = OTHER; note = 2'-fluoro ribonucleotide
  modified_base 4: mod_base = OTHER; note = 2'-O-methyl ribonucleotide
  modified_base 5: mod_base = OTHER; note = 2'-fluoro ribonucleotide
  modified_base 6: mod_base = OTHER; note = 2'-O-methyl ribonucleotide
  modified_base 7: mod_base = OTHER; note = 2'-fluoro ribonucleotide
  modified_base 8: mod_base = OTHER; note = 2'-O-methyl ribonucleotide
  modified_base 9: mod_base = OTHER; note = 2'-fluoro ribonucleotide
  modified_base 10: mod_base = OTHER; note = 2'-O-methyl ribonucleotide
  modified_base 11: mod_base = OTHER; note = 2'-fluoro ribonucleotide
  modified_base 12: mod_base = OTHER; note = 2'-O-methyl ribonucleotide
  modified_base 13: mod_base = OTHER; note = 2'-fluoro ribonucleotide
  modified_base 14: mod_base = OTHER; note = 2'-O-methyl ribonucleotide
  modified_base 15: mod_base = OTHER; note = 2'-fluoro ribonucleotide
  modified_base 16: mod_base = OTHER; note = 2'-O-methyl ribonucleotide
  modified_base 17: mod_base = OTHER; note = 2'-fluoro ribonucleotide
  modified_base 18: mod_base = OTHER; note = 2'-O-methyl ribonucleotide
  modified_base 19: mod_base = OTHER; note = 2'-fluoro ribonucleotide
  modified_base 1..3: mod_base = OTHER; note = phosphorothioate linkage
gtcgcatctcagtgcagga

SEQ ID NO: 1938 - RNA, 19 nt, synthetic construct
  source 1..19: mol_type = other RNA
  modified_base 1: mod_base = OTHER; note = 2'-fluoro ribonucleotide
  modified_base 2: mod_base = OTHER; note = 2'-O-methyl ribonucleotide
  modified_base 3: mod_base = OTHER; note = 2'-fluoro ribonucleotide
  modified_base 4: mod_base = OTHER; note = 2'-O-methyl ribonucleotide
  modified_base 5: mod_base = OTHER; note = 2'-fluoro ribonucleotide
  modified_base 6: mod_base = OTHER; note = 2'-O-methyl ribonucleotide
  modified_base 7..9: mod_base = OTHER; note = 2'-fluoro ribonucleotide
  modified_base 10: mod_base = OTHER; note = 2'-O-methyl ribonucleotide
  modified_base 11: mod_base = OTHER; note = 2'-fluoro ribonucleotide
  modified_base 12..14: mod_base = OTHER; note = 2'-O-methyl ribonucleotide
  modified_base 15: mod_base = OTHER; note = 2'-fluoro ribonucleotide
  modified_base 16: mod_base = OTHER; note = 2'-O-methyl ribonucleotide
  modified_base 17: mod_base = OTHER; note = 2'-fluoro ribonucleotide
  modified_base 18..19: mod_base = OTHER; note = 2'-O-methyl ribonucleotide
  modified_base 1..3: mod_base = OTHER; note = phosphorothioate linkage
gtcgcatctcagtgcagga

SEQ ID NO: 1939 - RNA, 19 nt, synthetic construct
  source 1..19: mol_type = other RNA
  modified_base 1..2: mod_base = OTHER; note = 2'-O-methyl ribonucleotide
  modified_base 3: mod_base = OTHER; note = 2'-fluoro ribonucleotide
  modified_base 4..6: mod_base = OTHER; note = 2'-O-methyl ribonucleotide
  modified_base 7..9: mod_base = OTHER; note = 2'-fluoro ribonucleotide
  modified_base 10..11: mod_base = OTHER; note = 2'-O-methyl ribonucleotide
  modified_base 12: mod_base = OTHER; note = 2'-fluoro ribonucleotide
  modified_base 13..16: mod_base = OTHER; note = 2'-O-methyl ribonucleotide
  modified_base 17: mod_base = OTHER; note = 2'-fluoro ribonucleotide
  modified_base 18..19: mod_base = OTHER; note = 2'-O-methyl ribonucleotide
  modified_base 17..19: mod_base = OTHER; note = phosphorothioate linkage
gaacctctcacttcaccca

SEQ ID NO: 1940 - RNA, 19 nt, synthetic construct
  source 1..19: mol_type = other RNA
  modified_base 1..2: mod_base = OTHER; note = 2'-O-methyl ribonucleotide
  modified_base 3: mod_base = OTHER; note = 2'-fluoro ribonucleotide
  modified_base 4..6: mod_base = OTHER; note = 2'-O-methyl ribonucleotide
  modified_base 7..9: mod_base = OTHER; note = 2'-fluoro ribonucleotide
  modified_base 10..11: mod_base = OTHER; note = 2'-O-methyl ribonucleotide
  modified_base 12: mod_base = OTHER; note = 2'-fluoro ribonucleotide
  modified_base 13..16: mod_base = OTHER; note = 2'-O-methyl ribonucleotide
  modified_base 17: mod_base = OTHER; note = 2'-fluoro ribonucleotide
  modified_base 18..19: mod_base = OTHER; note = 2'-O-methyl ribonucleotide
  modified_base 17..19: mod_base = OTHER; note = phosphorothioate linkage
gcaggagactggctaaata

SEQ ID NO: 1941 - RNA, 19 nt, synthetic construct
  source 1..19: mol_type = other RNA
  modified_base 1..2: mod_base = OTHER; note = 2'-O-methyl ribonucleotide
  modified_base 3: mod_base = OTHER; note = 2'-fluoro ribonucleotide
  modified_base 4..6: mod_base = OTHER; note = 2'-O-methyl ribonucleotide
  modified_base 7..9: mod_base = OTHER; note = 2'-fluoro ribonucleotide
  modified_base 10..11: mod_base = OTHER; note = 2'-O-methyl ribonucleotide
  modified_base 12: mod_base = OTHER; note = 2'-fluoro ribonucleotide
  modified_base 13..16: mod_base = OTHER; note = 2'-O-methyl ribonucleotide
  modified_base 17: mod_base = OTHER; note = 2'-fluoro ribonucleotide
  modified_base 18..19: mod_base = OTHER; note = 2'-O-methyl ribonucleotide
  modified_base 17..19: mod_base = OTHER; note = phosphorothioate linkage
agaaacagttcaccttgaa

SEQ ID NO: 1942 - RNA, 19 nt, synthetic construct
  source 1..19: mol_type = other RNA
  modified_base 1..2: mod_base = OTHER; note = 2'-O-methyl ribonucleotide
  modified_base 3: mod_base = OTHER; note = 2'-fluoro ribonucleotide
  modified_base 4..6: mod_base = OTHER; note = 2'-O-methyl ribonucleotide
  modified_base 7..9: mod_base = OTHER; note = 2'-fluoro ribonucleotide
  modified_base 10..11: mod_base = OTHER; note = 2'-O-methyl ribonucleotide
  modified_base 12: mod_base = OTHER; note = 2'-fluoro ribonucleotide
  modified_base 13..16: mod_base = OTHER; note = 2'-O-methyl ribonucleotide
  modified_base 17: mod_base = OTHER; note = 2'-fluoro ribonucleotide
  modified_base 18..19: mod_base = OTHER; note = 2'-O-methyl ribonucleotide
  modified_base 17..19: mod_base = OTHER; note = phosphorothioate linkage
gaaacagttcaccttgaaa

SEQ ID NO: 1943 - RNA, 19 nt, synthetic construct
  source 1..19: mol_type = other RNA
  modified_base 1..2: mod_base = OTHER; note = 2'-O-methyl ribonucleotide
  modified_base 3: mod_base = OTHER; note = 2'-fluoro ribonucleotide
  modified_base 4..6: mod_base = OTHER; note = 2'-O-methyl ribonucleotide
  modified_base 7..9: mod_base = OTHER; note = 2'-fluoro ribonucleotide
  modified_base 10..11: mod_base = OTHER; note = 2'-O-methyl ribonucleotide
  modified_base 12: mod_base = OTHER; note = 2'-fluoro ribonucleotide
  modified_base 13..16: mod_base = OTHER; note = 2'-O-methyl ribonucleotide
  modified_base 17: mod_base = OTHER; note = 2'-fluoro ribonucleotide
  modified_base 18..19: mod_base = OTHER; note = 2'-O-methyl ribonucleotide
  modified_base 17..19: mod_base = OTHER; note = phosphorothioate linkage
gaaacagttcaccttgaaa

SEQ ID NO: 1944 - RNA, 19 nt, synthetic construct
  source 1..19: mol_type = other RNA
  modified_base 1..2: mod_base = OTHER; note = 2'-O-methyl ribonucleotide
  modified_base 3: mod_base = OTHER; note = 2'-fluoro ribonucleotide
  modified_base 4..6: mod_base = OTHER; note = 2'-O-methyl ribonucleotide
  modified_base 7..9: mod_base = OTHER; note = 2'-fluoro ribonucleotide
  modified_base 10..11: mod_base = OTHER; note = 2'-O-methyl ribonucleotide
  modified_base 12: mod_base = OTHER; note = 2'-fluoro ribonucleotide
  modified_base 13..16: mod_base = OTHER; note = 2'-O-methyl ribonucleotide
  modified_base 17: mod_base = OTHER; note = 2'-fluoro ribonucleotide
  modified_base 18..19: mod_base = OTHER; note = 2'-O-methyl ribonucleotide
  modified_base 17..19: mod_base = OTHER; note = phosphorothioate linkage
acctctcacttcaccctga

SEQ ID NO: 1945 - RNA, 19 nt, synthetic construct
  source 1..19: mol_type = other RNA
  modified_base 1..2: mod_base = OTHER; note = 2'-O-methyl ribonucleotide
  modified_base 3: mod_base = OTHER; note = 2'-fluoro ribonucleotide
  modified_base 4..6: mod_base = OTHER; note = 2'-O-methyl ribonucleotide
  modified_base 7..9: mod_base = OTHER; note = 2'-fluoro ribonucleotide
  modified_base 10..11: mod_base = OTHER; note = 2'-O-methyl ribonucleotide
  modified_base 12: mod_base = OTHER; note = 2'-fluoro ribonucleotide
  modified_base 13..16: mod_base = OTHER; note = 2'-O-methyl ribonucleotide
  modified_base 17: mod_base = OTHER; note = 2'-fluoro ribonucleotide
  modified_base 18..19: mod_base = OTHER; note = 2'-O-methyl ribonucleotide
  modified_base 17..19: mod_base = OTHER; note = phosphorothioate linkage
acttcaccctggagcccaa

SEQ ID NO: 1946 - RNA, 19 nt, synthetic construct
  source 1..19: mol_type = other RNA
  modified_base 1..2: mod_base = OTHER; note = 2'-O-methyl ribonucleotide
  modified_base 3: mod_base = OTHER; note = 2'-fluoro ribonucleotide
  modified_base 4..6: mod_base = OTHER; note = 2'-O-methyl ribonucleotide
  modified_base 7..9: mod_base = OTHER; note = 2'-fluoro ribonucleotide
  modified_base 10..11: mod_base = OTHER; note = 2'-O-methyl ribonucleotide
  modified_base 12: mod_base = OTHER; note = 2'-fluoro ribonucleotide
  modified_base 13..16: mod_base = OTHER; note = 2'-O-methyl ribonucleotide
  modified_base 17: mod_base = OTHER; note = 2'-fluoro ribonucleotide
  modified_base 18..19: mod_base = OTHER; note = 2'-O-methyl ribonucleotide
  modified_base 1..3: mod_base = OTHER; note = phosphorothioate linkage
gaaacagttcaccttgaaa

SEQ ID NO: 1947 - RNA, 19 nt, synthetic construct
  source 1..19: mol_type = other RNA
  modified_base 1..2: mod_base = OTHER; note = 2'-O-methyl ribonucleotide
  modified_base 3: mod_base = OTHER; note = 2'-fluoro ribonucleotide
  modified_base 4..6: mod_base = OTHER; note = 2'-O-methyl ribonucleotide
  modified_base 7..9: mod_base = OTHER; note = 2'-fluoro ribonucleotide
  modified_base 10..11: mod_base = OTHER; note = 2'-O-methyl ribonucleotide
  modified_base 12: mod_base = OTHER; note = 2'-fluoro ribonucleotide
  modified_base 13..16: mod_base = OTHER; note = 2'-O-methyl ribonucleotide
  modified_base 17: mod_base = OTHER; note = 2'-fluoro ribonucleotide
  modified_base 18..19: mod_base = OTHER; note = 2'-O-methyl ribonucleotide
  modified_base 17..19: mod_base = OTHER; note = phosphorothioate linkage
gtcgcatctcagtgcagga

SEQ ID NO: 1948 - RNA, 19 nt, synthetic construct
  source 1..19: mol_type = other RNA
  modified_base 1..2: mod_base = OTHER; note = 2'-O-methyl ribonucleotide
  modified_base 3: mod_base = OTHER; note = 2'-fluoro ribonucleotide
  modified_base 4..6: mod_base = OTHER; note = 2'-O-methyl ribonucleotide
  modified_base 7..9: mod_base = OTHER; note = 2'-fluoro ribonucleotide
  modified_base 10..11: mod_base = OTHER; note = 2'-O-methyl ribonucleotide
  modified_base 12: mod_base = OTHER; note = 2'-fluoro ribonucleotide
  modified_base 13..16: mod_base = OTHER; note = 2'-O-methyl ribonucleotide
  modified_base 17: mod_base = OTHER; note = 2'-fluoro ribonucleotide
  modified_base 18..19: mod_base = OTHER; note = 2'-O-methyl ribonucleotide
  modified_base 17..19: mod_base = OTHER; note = phosphorothioate linkage
gtcgcatctcagtgcagga

SEQ ID NO: 1949 - RNA, 19 nt, synthetic construct
  source 1..19: mol_type = other RNA
  modified_base 1..2: mod_base = OTHER; note = 2'-O-methyl ribonucleotide
  modified_base 3: mod_base = OTHER; note = 2'-fluoro ribonucleotide
  modified_base 4..6: mod_base = OTHER; note = 2'-O-methyl ribonucleotide
  modified_base 7..9: mod_base = OTHER; note = 2'-fluoro ribonucleotide
  modified_base 10..11: mod_base = OTHER; note = 2'-O-methyl ribonucleotide
  modified_base 12: mod_base = OTHER; note = 2'-fluoro ribonucleotide
  modified_base 13..16: mod_base = OTHER; note = 2'-O-methyl ribonucleotide
  modified_base 17: mod_base = OTHER; note = 2'-fluoro ribonucleotide
  modified_base 18..19: mod_base = OTHER; note = 2'-O-methyl ribonucleotide
  modified_base 17..19: mod_base = OTHER; note = phosphorothioate linkage
gtcgcatctcagtgcagga

SEQ ID NO: 1950 - RNA, 19 nt, synthetic construct
  source 1..19: mol_type = other RNA
  modified_base 1..2: mod_base = OTHER; note = 2'-O-methyl ribonucleotide
  modified_base 3: mod_base = OTHER; note = 2'-fluoro ribonucleotide
  modified_base 4..6: mod_base = OTHER; note = 2'-O-methyl ribonucleotide
  modified_base 7..9: mod_base = OTHER; note = 2'-fluoro ribonucleotide
  modified_base 10..11: mod_base = OTHER; note = 2'-O-methyl ribonucleotide
  modified_base 12: mod_base = OTHER; note = 2'-fluoro ribonucleotide
  modified_base 13..16: mod_base = OTHER; note = 2'-O-methyl ribonucleotide
  modified_base 17: mod_base = OTHER; note = 2'-fluoro ribonucleotide
  modified_base 18..19: mod_base = OTHER; note = 2'-O-methyl ribonucleotide
  modified_base 17..19: mod_base = OTHER; note = phosphorothioate linkage
gtcgcatctcagtgcagga

SEQ ID NO: 1951 - RNA, 19 nt, synthetic construct
  source 1..19: mol_type = other RNA
  modified_base 1..2: mod_base = OTHER; note = 2'-O-methyl ribonucleotide
  modified_base 3: mod_base = OTHER; note = 2'-fluoro ribonucleotide
  modified_base 4..6: mod_base = OTHER; note = 2'-O-methyl ribonucleotide
  modified_base 7..9: mod_base = OTHER; note = 2'-fluoro ribonucleotide
  modified_base 10..11: mod_base = OTHER; note = 2'-O-methyl ribonucleotide
  modified_base 12: mod_base = OTHER; note = 2'-fluoro ribonucleotide
  modified_base 13..16: mod_base = OTHER; note = 2'-O-methyl ribonucleotide
  modified_base 17: mod_base = OTHER; note = 2'-fluoro ribonucleotide
  modified_base 18..19: mod_base = OTHER; note = 2'-O-methyl ribonucleotide
  modified_base 17..19: mod_base = OTHER; note = phosphorothioate linkage
gtcgcatctcagtgcagga

SEQ ID NO: 1952 - RNA, 19 nt, synthetic construct
  source 1..19: mol_type = other RNA
  modified_base 1..2: mod_base = OTHER; note = 2'-O-methyl ribonucleotide
  modified_base 3: mod_base = OTHER; note = 2'-fluoro ribonucleotide
  modified_base 4..6: mod_base = OTHER; note = 2'-O-methyl ribonucleotide
  modified_base 7..9: mod_base = OTHER; note = 2'-fluoro ribonucleotide
  modified_base 10..11: mod_base = OTHER; note = 2'-O-methyl ribonucleotide
  modified_base 12: mod_base = OTHER; note = 2'-fluoro ribonucleotide
  modified_base 13..16: mod_base = OTHER; note = 2'-O-methyl ribonucleotide
  modified_base 17: mod_base = OTHER; note = 2'-fluoro ribonucleotide
  modified_base 18..19: mod_base = OTHER; note = 2'-O-methyl ribonucleotide
  modified_base 17..19: mod_base = OTHER; note = phosphorothioate linkage
gtcgcatctcagtgcagga

SEQ ID NO: 1953 - RNA, 19 nt, synthetic construct
  source 1..19: mol_type = other RNA
  modified_base 1..2: mod_base = OTHER; note = 2'-O-methyl ribonucleotide
  modified_base 3: mod_base = OTHER; note = 2'-fluoro ribonucleotide
  modified_base 4..6: mod_base = OTHER; note = 2'-O-methyl ribonucleotide
  modified_base 7..9: mod_base = OTHER; note = 2'-fluoro ribonucleotide
  modified_base 10..11: mod_base = OTHER; note = 2'-O-methyl ribonucleotide
  modified_base 12: mod_base = OTHER; note = 2'-fluoro ribonucleotide
  modified_base 13..16: mod_base = OTHER; note = 2'-O-methyl ribonucleotide
  modified_base 17: mod_base = OTHER; note = 2'-fluoro ribonucleotide
  modified_base 18..19: mod_base = OTHER; note = 2'-O-methyl ribonucleotide
  modified_base 17..19: mod_base = OTHER; note = phosphorothioate linkage
gtcgcatctcagtgcagga

SEQ ID NO: 1954 - RNA, 19 nt, synthetic construct
  source 1..19: mol_type = other RNA
  modified_base 1..2: mod_base = OTHER; note = 2'-O-methyl ribonucleotide
  modified_base 3: mod_base = OTHER; note = 2'-fluoro ribonucleotide
  modified_base 4..6: mod_base = OTHER; note = 2'-O-methyl ribonucleotide
  modified_base 7..9: mod_base = OTHER; note = 2'-fluoro ribonucleotide
  modified_base 10..11: mod_base = OTHER; note = 2'-O-methyl ribonucleotide
  modified_base 12: mod_base = OTHER; note = 2'-fluoro ribonucleotide
  modified_base 13..16: mod_base = OTHER; note = 2'-O-methyl ribonucleotide
  modified_base 17: mod_base = OTHER; note = 2'-fluoro ribonucleotide
  modified_base 18..19: mod_base = OTHER; note = 2'-O-methyl ribonucleotide
  modified_base 17..19: mod_base = OTHER; note = phosphorothioate linkage
gaaacagttcaccttgaaa

SEQ ID NO: 1955 - RNA, 19 nt, synthetic construct
  source 1..19: mol_type = other RNA
  modified_base 1..2: mod_base = OTHER; note = 2'-O-methyl ribonucleotide
  modified_base 3: mod_base = OTHER; note = 2'-fluoro ribonucleotide
  modified_base 4..6: mod_base = OTHER; note = 2'-O-methyl ribonucleotide
  modified_base 7..9: mod_base = OTHER; note = 2'-fluoro ribonucleotide
  modified_base 10..11: mod_base = OTHER; note = 2'-O-methyl ribonucleotide
  modified_base 12: mod_base = OTHER; note = 2'-fluoro ribonucleotide
  modified_base 13..16: mod_base = OTHER; note = 2'-O-methyl ribonucleotide
  modified_base 17: mod_base = OTHER; note = 2'-fluoro ribonucleotide
  modified_base 18..19: mod_base = OTHER; note = 2'-O-methyl ribonucleotide
  modified_base 17..19: mod_base = OTHER; note = phosphorothioate linkage
gaaacagttcaccttgaaa

SEQ ID NO: 1956 - RNA, 19 nt, synthetic construct
  source 1..19: mol_type = other RNA
  modified_base 1..2: mod_base = OTHER; note = 2'-O-methyl ribonucleotide
  modified_base 3: mod_base = OTHER; note = 2'-fluoro ribonucleotide
  modified_base 4..6: mod_base = OTHER; note = 2'-O-methyl ribonucleotide
  modified_base 7..9: mod_base = OTHER; note = 2'-fluoro ribonucleotide
  modified_base 10..11: mod_base = OTHER; note = 2'-O-methyl ribonucleotide
  modified_base 12: mod_base = OTHER; note = 2'-fluoro ribonucleotide
  modified_base 13..16: mod_base = OTHER; note = 2'-O-methyl ribonucleotide
  modified_base 17: mod_base = OTHER; note = 2'-fluoro ribonucleotide
  modified_base 18..19: mod_base = OTHER; note = 2'-O-methyl ribonucleotide
  modified_base 17..19: mod_base = OTHER; note = phosphorothioate linkage
gaaacagttcaccttgaaa

SEQ ID NO: 1957 - RNA, 19 nt, synthetic construct
  source 1..19: mol_type = other RNA
  modified_base 1..2: mod_base = OTHER; note = 2'-O-methyl ribonucleotide
  modified_base 3: mod_base = OTHER; note = 2'-fluoro ribonucleotide
  modified_base 4..6: mod_base = OTHER; note = 2'-O-methyl ribonucleotide
  modified_base 7..9: mod_base = OTHER; note = 2'-fluoro ribonucleotide
  modified_base 10..11: mod_base = OTHER; note = 2'-O-methyl ribonucleotide
  modified_base 12: mod_base = OTHER; note = 2'-fluoro ribonucleotide
  modified_base 13..16: mod_base = OTHER; note = 2'-O-methyl ribonucleotide
  modified_base 17: mod_base = OTHER; note = 2'-fluoro ribonucleotide
  modified_base 18..19: mod_base = OTHER; note = 2'-O-methyl ribonucleotide
  modified_base 17..19: mod_base = OTHER; note = phosphorothioate linkage
gaaacagttcaccttgaaa

SEQ ID NO: 1958 - RNA, 19 nt, synthetic construct
  source 1..19: mol_type = other RNA
  modified_base 1..2: mod_base = OTHER; note = 2'-O-methyl ribonucleotide
  modified_base 3: mod_base = OTHER; note = 2'-fluoro ribonucleotide
  modified_base 4..6: mod_base = OTHER; note = 2'-O-methyl ribonucleotide
  modified_base 7..9: mod_base = OTHER; note = 2'-fluoro ribonucleotide
  modified_base 10..11: mod_base = OTHER; note = 2'-O-methyl ribonucleotide
  modified_base 12: mod_base = OTHER; note = 2'-fluoro ribonucleotide
  modified_base 13..16: mod_base = OTHER; note = 2'-O-methyl ribonucleotide
  modified_base 17: mod_base = OTHER; note = 2'-fluoro ribonucleotide
  modified_base 18..19: mod_base = OTHER; note = 2'-O-methyl ribonucleotide
  modified_base 17..19: mod_base = OTHER; note = phosphorothioate linkage
gaaacagttcaccttgaaa

SEQ ID NO: 1959 - RNA, 19 nt, synthetic construct
  source 1..19: mol_type = other RNA
  modified_base 1..2: mod_base = OTHER; note = 2'-O-methyl ribonucleotide
  modified_base 3: mod_base = OTHER; note = 2'-fluoro ribonucleotide
  modified_base 4..6: mod_base = OTHER; note = 2'-O-methyl ribonucleotide
  modified_base 7..9: mod_base = OTHER; note = 2'-fluoro ribonucleotide
  modified_base 10..11: mod_base = OTHER; note = 2'-O-methyl ribonucleotide
  modified_base 12: mod_base = OTHER; note = 2'-fluoro ribonucleotide
  modified_base 13..16: mod_base = OTHER; note = 2'-O-methyl ribonucleotide
  modified_base 17: mod_base = OTHER; note = 2'-fluoro ribonucleotide
  modified_base 18..19: mod_base = OTHER; note = 2'-O-methyl ribonucleotide
  modified_base 17..19: mod_base = OTHER; note = phosphorothioate linkage
gtcgcatctcagtgcagga

SEQ ID NO: 1960 - RNA, 21 nt, synthetic construct
  source 1..21: mol_type = other RNA
  modified_base 1: mod_base = OTHER; note = 2'-O methyl vinyl phosphonate uridine
  modified_base 2: mod_base = OTHER; note = 2'-fluoro ribonucleotide
  modified_base 3..13: mod_base = OTHER; note = 2'-O-methyl ribonucleotide
  modified_base 14: mod_base = OTHER; note = 2'-fluoro ribonucleotide
  modified_base 15..21: mod_base = OTHER; note = 2'-O-methyl ribonucleotide
  modified_base 1..3: mod_base = OTHER; note = phosphorothioate linkage
  modified_base 19..21: mod_base = OTHER; note = phosphorothioate linkage
ttttagccagtctcctgcttt

SEQ ID NO: 1961 - RNA, 21 nt, synthetic construct
  source 1..21: mol_type = other RNA
  modified_base 1: mod_base = OTHER; note = 2'-O methyl vinyl phosphonate uridine
  modified_base 2: mod_base = OTHER; note = 2'-fluoro ribonucleotide
  modified_base 3..13: mod_base = OTHER; note = 2'-O-methyl ribonucleotide
  modified_base 14: mod_base = OTHER; note = 2'-fluoro ribonucleotide
  modified_base 15..21: mod_base = OTHER; note = 2'-O-methyl ribonucleotide
  modified_base 1..3: mod_base = OTHER; note = phosphorothioate linkage
  modified_base 19..21: mod_base = OTHER; note = phosphorothioate linkage
ttatttagccagtctcctgtt

SEQ ID NO: 1962-1999 - skipped (38 entries)

SEQ ID NO: 2000 - RNA, 21 nt, synthetic construct
  source 1..21: mol_type = other RNA
  modified_base 1: mod_base = OTHER; note = 2'-O methyl vinyl phosphonate uridine
  modified_base 2: mod_base = OTHER; note = 2'-fluoro ribonucleotide
  modified_base 3..13: mod_base = OTHER; note = 2'-O-methyl ribonucleotide
  modified_base 14: mod_base = OTHER; note = 2'-fluoro ribonucleotide
  modified_base 15..21: mod_base = OTHER; note = 2'-O-methyl ribonucleotide
  modified_base 1..3: mod_base = OTHER; note = phosphorothioate linkage
  modified_base 19..21: mod_base = OTHER; note = phosphorothioate linkage
ttcaaggtgaactgtttcttt

SEQ ID NO: 2001 - RNA, 21 nt, synthetic construct
  source 1..21: mol_type = other RNA
  modified_base 1: mod_base = OTHER; note = 2'-O methyl vinyl phosphonate uridine
  modified_base 2: mod_base = OTHER; note = 2'-fluoro ribonucleotide
  modified_base 3..13: mod_base = OTHER; note = 2'-O-methyl ribonucleotide
  modified_base 14: mod_base = OTHER; note = 2'-fluoro ribonucleotide
  modified_base 15..21: mod_base = OTHER; note = 2'-O-methyl ribonucleotide
  modified_base 1..3: mod_base = OTHER; note = phosphorothioate linkage
  modified_base 19..21: mod_base = OTHER; note = phosphorothioate linkage
tttcaaggtgaactgtttctt

SEQ ID NO: 2002 - RNA, 21 nt, synthetic construct
  source 1..21: mol_type = other RNA
  modified_base 1: mod_base = OTHER; note = 2'-O methyl vinyl phosphonate uridine
  modified_base 2: mod_base = OTHER; note = 2'-fluoro ribonucleotide
  modified_base 3..13: mod_base = OTHER; note = 2'-O-methyl ribonucleotide
  modified_base 14: mod_base = OTHER; note = 2'-fluoro ribonucleotide
  modified_base 15..21: mod_base = OTHER; note = 2'-O-methyl ribonucleotide
  modified_base 1..3: mod_base = OTHER; note = phosphorothioate linkage
  modified_base 19..21: mod_base = OTHER; note = phosphorothioate linkage
tagggtgaagtgagaggtttt

SEQ ID NO: 2003 - RNA, 21 nt, synthetic construct
  source 1..21: mol_type = other RNA
  modified_base 1: mod_base = OTHER; note = 2'-O methyl vinyl phosphonate uridine
  modified_base 2: mod_base = OTHER; note = 2'-fluoro ribonucleotide
  modified_base 3..13: mod_base = OTHER; note = 2'-O-methyl ribonucleotide
  modified_base 14: mod_base = OTHER; note = 2'-fluoro ribonucleotide
  modified_base 15..21: mod_base = OTHER; note = 2'-O-methyl ribonucleotide
  modified_base 1..3: mod_base = OTHER; note = phosphorothioate linkage
  modified_base 19..21: mod_base = OTHER; note = phosphorothioate linkage
tcagggtgaagtgagaggttt

SEQ ID NO: 2004 - RNA, 21 nt, synthetic construct
  source 1..21: mol_type = other RNA
  modified_base 1: mod_base = OTHER; note = 2'-O methyl vinyl phosphonate uridine
  modified_base 2: mod_base = OTHER; note = 2'-fluoro ribonucleotide
  modified_base 3..13: mod_base = OTHER; note = 2'-O-methyl ribonucleotide
  modified_base 14: mod_base = OTHER; note = 2'-fluoro ribonucleotide
  modified_base 15..21: mod_base = OTHER; note = 2'-O-methyl ribonucleotide
  modified_base 1..3: mod_base = OTHER; note = phosphorothioate linkage
  modified_base 19..21: mod_base = OTHER; note = phosphorothioate linkage
tccagggtgaagtgagaggtt

SEQ ID NO: 2005 - RNA, 21 nt, synthetic construct
  source 1..21: mol_type = other RNA
  modified_base 1: mod_base = OTHER; note = 2'-O methyl vinyl phosphonate uridine
  modified_base 2: mod_base = OTHER; note = 2'-fluoro ribonucleotide
  modified_base 3..13: mod_base = OTHER; note = 2'-O-methyl ribonucleotide
  modified_base 14: mod_base = OTHER; note = 2'-fluoro ribonucleotide
  modified_base 15..21: mod_base = OTHER; note = 2'-O-methyl ribonucleotide
  modified_base 1..3: mod_base = OTHER; note = phosphorothioate linkage
  modified_base 19..21: mod_base = OTHER; note = phosphorothioate linkage
ttccagggtgaagtgagagtt

SEQ ID NO: 2006 - RNA, 21 nt, synthetic construct
  source 1..21: mol_type = other RNA
  modified_base 1: mod_base = OTHER; note = 2'-O methyl vinyl phosphonate uridine
  modified_base 2: mod_base = OTHER; note = 2'-fluoro ribonucleotide
  modified_base 3..13: mod_base = OTHER; note = 2'-O-methyl ribonucleotide
  modified_base 14: mod_base = OTHER; note = 2'-fluoro ribonucleotide
  modified_base 15..21: mod_base = OTHER; note = 2'-O-methyl ribonucleotide
  modified_base 1..3: mod_base = OTHER; note = phosphorothioate linkage
  modified_base 19..21: mod_base = OTHER; note = phosphorothioate linkage
tctccagggtgaagtgagatt

SEQ ID NO: 2007 - RNA, 21 nt, synthetic construct
  source 1..21: mol_type = other RNA
  modified_base 1: mod_base = OTHER; note = 2'-O methyl vinyl phosphonate uridine
  modified_base 2: mod_base = OTHER; note = 2'-fluoro ribonucleotide
  modified_base 3..13: mod_base = OTHER; note = 2'-O-methyl ribonucleotide
  modified_base 14: mod_base = OTHER; note = 2'-fluoro ribonucleotide
  modified_base 15..21: mod_base = OTHER; note = 2'-O-methyl ribonucleotide
  modified_base 1..3: mod_base = OTHER; note = phosphorothioate linkage
  modified_base 19..21: mod_base = OTHER; note = phosphorothioate linkage
tgctccagggtgaagtgagtt

SEQ ID NO: 2008 - RNA, 21 nt, synthetic construct
  source 1..21: mol_type = other RNA
  modified_base 1: mod_base = OTHER; note = 2'-O methyl vinyl phosphonate uridine
  modified_base 2: mod_base = OTHER; note = 2'-fluoro ribonucleotide
  modified_base 3..13: mod_base = OTHER; note = 2'-O-methyl ribonucleotide
  modified_base 14: mod_base = OTHER; note = 2'-fluoro ribonucleotide
  modified_base 15..21: mod_base = OTHER; note = 2'-O-methyl ribonucleotide
  modified_base 1..3: mod_base = OTHER; note = phosphorothioate linkage
  modified_base 19..21: mod_base = OTHER; note = phosphorothioate linkage
tggctccagggtgaagtgatt

SEQ ID NO: 2009 - RNA, 21 nt, synthetic construct
  source 1..21: mol_type = other RNA
  modified_base 1: mod_base = OTHER; note = 2'-O methyl vinyl phosphonate uridine
  modified_base 2: mod_base = OTHER; note = 2'-fluoro ribonucleotide
  modified_base 3..13: mod_base = OTHER; note = 2'-O-methyl ribonucleotide
  modified_base 14: mod_base = OTHER; note = 2'-fluoro ribonucleotide
  modified_base 15..21: mod_base = OTHER; note = 2'-O-methyl ribonucleotide
  modified_base 1..3: mod_base = OTHER; note = phosphorothioate linkage
  modified_base 19..21: mod_base = OTHER; note = phosphorothioate linkage
tgggctccagggtgaagtgtt

SEQ ID NO: 2010 - RNA, 21 nt, synthetic construct
  source 1..21: mol_type = other RNA
  modified_base 1: mod_base = OTHER; note = 2'-O methyl vinyl phosphonate uridine
  modified_base 2: mod_base = OTHER; note = 2'-fluoro ribonucleotide
  modified_base 3..13: mod_base = OTHER; note = 2'-O-methyl ribonucleotide
  modified_base 14: mod_base = OTHER; note = 2'-fluoro ribonucleotide
  modified_base 15..21: mod_base = OTHER; note = 2'-O-methyl ribonucleotide
  modified_base 1..3: mod_base = OTHER; note = phosphorothioate linkage
  modified_base 19..21: mod_base = OTHER; note = phosphorothioate linkage
ttgggctccagggtgaagttt

SEQ ID NO: 2011 - RNA, 21 nt, synthetic construct
  source 1..21: mol_type = other RNA
  modified_base 1: mod_base = OTHER; note = 2'-O methyl vinyl phosphonate uridine
  modified_base 2: mod_base = OTHER; note = 2'-fluoro ribonucleotide
  modified_base 3..13: mod_base = OTHER; note = 2'-O-methyl ribonucleotide
  modified_base 14: mod_base = OTHER; note = 2'-fluoro ribonucleotide
  modified_base 15..21: mod_base = OTHER; note = 2'-O-methyl ribonucleotide
  modified_base 1..3: mod_base = OTHER; note = phosphorothioate linkage
  modified_base 19..21: mod_base = OTHER; note = phosphorothioate linkage
tatgggctccagggtgaagtt

SEQ ID NO: 2012 - RNA, 21 nt, synthetic construct
  source 1..21: mol_type = other RNA
  modified_base 1: mod_base = OTHER; note = 2'-O methyl vinyl phosphonate uridine
  modified_base 2: mod_base = OTHER; note = 2'-fluoro ribonucleotide
  modified_base 3..13: mod_base = OTHER; note = 2'-O-methyl ribonucleotide
  modified_base 14: mod_base = OTHER; note = 2'-fluoro ribonucleotide
  modified_base 15..21: mod_base = OTHER; note = 2'-O-methyl ribonucleotide
  modified_base 1..3: mod_base = OTHER; note = phosphorothioate linkage
  modified_base 19..21: mod_base = OTHER; note = phosphorothioate linkage
tgatgggctccagggtgaatt

SEQ ID NO: 2013 - RNA, 21 nt, synthetic construct
  source 1..21: mol_type = other RNA
  modified_base 1: mod_base = OTHER; note = 2'-O methyl vinyl phosphonate uridine
  modified_base 2: mod_base = OTHER; note = 2'-fluoro ribonucleotide
  modified_base 3..13: mod_base = OTHER; note = 2'-O-methyl ribonucleotide
  modified_base 14: mod_base = OTHER; note = 2'-fluoro ribonucleotide
  modified_base 15..21: mod_base = OTHER; note = 2'-O-methyl ribonucleotide
  modified_base 1..3: mod_base = OTHER; note = phosphorothioate linkage
  modified_base 19..21: mod_base = OTHER; note = phosphorothioate linkage
tggatgggctccagggtgatt

SEQ ID NO: 2014 - RNA, 21 nt, synthetic construct
  source 1..21: mol_type = other RNA
  modified_base 1: mod_base = OTHER; note = 2'-O methyl vinyl phosphonate uridine
  modified_base 2: mod_base = OTHER; note = 2'-fluoro ribonucleotide
  modified_base 3..13: mod_base = OTHER; note = 2'-O-methyl ribonucleotide
  modified_base 14: mod_base = OTHER; note = 2'-fluoro ribonucleotide
  modified_base 15..21: mod_base = OTHER; note = 2'-O-methyl ribonucleotide
  modified_base 1..3: mod_base = OTHER; note = phosphorothioate linkage
  modified_base 19..21: mod_base = OTHER; note = phosphorothioate linkage
ttggatgggctccagggtgtt

SEQ ID NO: 2015 - RNA, 21 nt, synthetic construct
  source 1..21: mol_type = other RNA
  modified_base 1: mod_base = OTHER; note = 2'-O methyl vinyl phosphonate uridine
  modified_base 2: mod_base = OTHER; note = 2'-fluoro ribonucleotide
  modified_base 3..13: mod_base = OTHER; note = 2'-O-methyl ribonucleotide
  modified_base 14: mod_base = OTHER; note = 2'-fluoro ribonucleotide
  modified_base 15..21: mod_base = OTHER; note = 2'-O-methyl ribonucleotide
  modified_base 1..3: mod_base = OTHER; note = phosphorothioate linkage
  modified_base 19..21: mod_base = OTHER; note = phosphorothioate linkage
tctggatgggctccagggttt

SEQ ID NO: 2016 - RNA, 21 nt, synthetic construct
  source 1..21: mol_type = other RNA
  modified_base 1: mod_base = OTHER; note = 2'-O methyl vinyl phosphonate uridine
  modified_base 2: mod_base = OTHER; note = 2'-fluoro ribonucleotide
  modified_base 3..13: mod_base = OTHER; note = 2'-O-methyl ribonucleotide
  modified_base 14: mod_base = OTHER; note = 2'-fluoro ribonucleotide
  modified_base 15..21: mod_base = OTHER; note = 2'-O-methyl ribonucleotide
  modified_base 1..3: mod_base = OTHER; note = phosphorothioate linkage
  modified_base 19..21: mod_base = OTHER; note = phosphorothioate linkage
tactggatgggctccagggtt

SEQ ID NO: 2017 - RNA, 21 nt, synthetic construct
  source 1..21: mol_type = other RNA
  modified_base 1: mod_base = OTHER; note = 2'-O methyl vinyl phosphonate uridine
  modified_base 2: mod_base = OTHER; note = 2'-fluoro ribonucleotide
  modified_base 3..13: mod_base = OTHER; note = 2'-O-methyl ribonucleotide
  modified_base 14: mod_base = OTHER; note = 2'-fluoro ribonucleotide
  modified_base 15..21: mod_base = OTHER; note = 2'-O-methyl ribonucleotide
  modified_base 1..3: mod_base = OTHER; note = phosphorothioate linkage
  modified_base 19..21: mod_base = OTHER; note = phosphorothioate linkage
tgactggatgggctccaggtt

SEQ ID NO: 2018 - RNA, 21 nt, synthetic construct
  source 1..21: mol_type = other RNA
  modified_base 1: mod_base = OTHER; note = 2'-O methyl vinyl phosphonate uridine
  modified_base 2: mod_base = OTHER; note = 2'-fluoro ribonucleotide
  modified_base 3..13: mod_base = OTHER; note = 2'-O-methyl ribonucleotide
  modified_base 14: mod_base = OTHER; note = 2'-fluoro ribonucleotide
  modified_base 15..21: mod_base = OTHER; note = 2'-O-methyl ribonucleotide
  modified_base 1..3: mod_base = OTHER; note = phosphorothioate linkage
  modified_base 19..21: mod_base = OTHER; note = phosphorothioate linkage
tagactggatgggctccagtt

SEQ ID NO: 2019 - RNA, 21 nt, synthetic construct
  source 1..21: mol_type = other RNA
  modified_base 1: mod_base = OTHER; note = 2'-O methyl vinyl phosphonate uridine
  modified_base 2: mod_base = OTHER; note = 2'-fluoro ribonucleotide
  modified_base 3..13: mod_base = OTHER; note = 2'-O-methyl ribonucleotide
  modified_base 14: mod_base = OTHER; note = 2'-fluoro ribonucleotide
  modified_base 15..21: mod_base = OTHER; note = 2'-O-methyl ribonucleotide
  modified_base 1..3: mod_base = OTHER; note = phosphorothioate linkage
  modified_base 19..21: mod_base = OTHER; note = phosphorothioate linkage
ttgatggacagttaagcagtt

SEQ ID NO: 2020 - RNA, 21 nt, synthetic construct
  source 1..21: mol_type = other RNA
  modified_base 1: mod_base = OTHER; note = 2'-O methyl vinyl phosphonate uridine
  modified_base 2: mod_base = OTHER; note = 2'-fluoro ribonucleotide
  modified_base 3..13: mod_base = OTHER; note = 2'-O-methyl ribonucleotide
  modified_base 14: mod_base = OTHER; note = 2'-fluoro ribonucleotide
  modified_base 15..21: mod_base = OTHER; note = 2'-O-methyl ribonucleotide
  modified_base 1..3: mod_base = OTHER; note = phosphorothioate linkage
  modified_base 19..21: mod_base = OTHER; note = phosphorothioate linkage
tctgatggacagttaagcatt

SEQ ID NO: 2021 - RNA, 21 nt, synthetic construct
  source 1..21: mol_type = other RNA
  modified_base 1: mod_base = OTHER; note = 2'-O methyl vinyl phosphonate uridine
  modified_base 2: mod_base = OTHER; note = 2'-fluoro ribonucleotide
  modified_base 3..13: mod_base = OTHER; note = 2'-O-methyl ribonucleotide
  modified_base 14: mod_base = OTHER; note = 2'-fluoro ribonucleotide
  modified_base 15..21: mod_base = OTHER; note = 2'-O-methyl ribonucleotide
  modified_base 1..3: mod_base = OTHER; note = phosphorothioate linkage
  modified_base 19..21: mod_base = OTHER; note = phosphorothioate linkage
tgctgatggacagttaagctt

SEQ ID NO: 2022 - RNA, 21 nt, synthetic construct
  source 1..21: mol_type = other RNA
  modified_base 1: mod_base = OTHER; note = 2'-O methyl vinyl phosphonate uridine
  modified_base 2: mod_base = OTHER; note = 2'-fluoro ribonucleotide
  modified_base 3..13: mod_base = OTHER; note = 2'-O-methyl ribonucleotide
  modified_base 14: mod_base = OTHER; note = 2'-fluoro ribonucleotide
  modified_base 15..21: mod_base = OTHER; note = 2'-O-methyl ribonucleotide
  modified_base 1..2: mod_base = OTHER; note = phosphorothioate linkage
  modified_base 19..21: mod_base = OTHER; note = phosphorothioate linkage
ttgctgatggacagttaagtt

SEQ ID NO: 2023 - RNA, 21 nt, synthetic construct
  source 1..21: mol_type = other RNA
  modified_base 1: mod_base = OTHER; note = 2'-O methyl vinyl phosphonate uridine
  modified_base 2: mod_base = OTHER; note = 2'-fluoro ribonucleotide
  modified_base 3..13: mod_base = OTHER; note = 2'-O-methyl ribonucleotide
  modified_base 14: mod_base = OTHER; note = 2'-fluoro ribonucleotide
  modified_base 15..21: mod_base = OTHER; note = 2'-O-methyl ribonucleotide
  modified_base 1..3: mod_base = OTHER; note = phosphorothioate linkage
  modified_base 19..21: mod_base = OTHER; note = phosphorothioate linkage
tctgctgatggacagttaatt

SEQ ID NO: 2024 - RNA, 21 nt, synthetic construct
  source 1..21: mol_type = other RNA
  modified_base 1: mod_base = OTHER; note = 2'-O methyl vinyl phosphonate uridine
  modified_base 2: mod_base = OTHER; note = 2'-fluoro ribonucleotide
  modified_base 3..13: mod_base = OTHER; note = 2'-O-methyl ribonucleotide
  modified_base 14: mod_base = OTHER; note = 2'-fluoro ribonucleotide
  modified_base 15..21: mod_base = OTHER; note = 2'-O-methyl ribonucleotide
  modified_base 1..3: mod_base = OTHER; note = phosphorothioate linkage
  modified_base 19..21: mod_base = OTHER; note = phosphorothioate linkage
ttcctgctgatggacagtttt

SEQ ID NO: 2025 - RNA, 21 nt, synthetic construct
  source 1..21: mol_type = other RNA
  modified_base 1: mod_base = OTHER; note = 2'-O methyl vinyl phosphonate uridine
  modified_base 2: mod_base = OTHER; note = 2'-fluoro ribonucleotide
  modified_base 3..13: mod_base = OTHER; note = 2'-O-methyl ribonucleotide
  modified_base 14: mod_base = OTHER; note = 2'-fluoro ribonucleotide
  modified_base 15..21: mod_base = OTHER; note = 2'-O-methyl ribonucleotide
  modified_base 1..3: mod_base = OTHER; note = phosphorothioate linkage
  modified_base 19..21: mod_base = OTHER; note = phosphorothioate linkage
tctcctgctgatggacagttt

SEQ ID NO: 2026 - RNA, 21 nt, synthetic construct
  source 1..21: mol_type = other RNA
  modified_base 1: mod_base = OTHER; note = 2'-O methyl vinyl phosphonate uridine
  modified_base 2: mod_base = OTHER; note = 2'-fluoro ribonucleotide
  modified_base 3..13: mod_base = OTHER; note = 2'-O-methyl ribonucleotide
  modified_base 14: mod_base = OTHER; note = 2'-fluoro ribonucleotide
  modified_base 15..21: mod_base = OTHER; note = 2'-O-methyl ribonucleotide
  modified_base 1..3: mod_base = OTHER; note = phosphorothioate linkage
  modified_base 19..21: mod_base = OTHER; note = phosphorothioate linkage
ttctcctgctgatggacagtt

SEQ ID NO: 2027 - RNA, 21 nt, synthetic construct
  source 1..21: mol_type = other RNA
  modified_base 1: mod_base = OTHER; note = 2'-O methyl vinyl phosphonate uridine
  modified_base 2: mod_base = OTHER; note = 2'-fluoro ribonucleotide
  modified_base 3..13: mod_base = OTHER; note = 2'-O-methyl ribonucleotide
  modified_base 14: mod_base = OTHER; note = 2'-fluoro ribonucleotide
  modified_base 15..21: mod_base = OTHER; note = 2'-O-methyl ribonucleotide
  modified_base 1..2: mod_base = OTHER; note = phosphorothioate linkage
  modified_base 19..21: mod_base = OTHER; note = phosphorothioate linkage
tagtctcctgctgatggactt

SEQ ID NO: 2028 - RNA, 21 nt, synthetic construct
  source 1..21: mol_type = other RNA
  modified_base 1: mod_base = OTHER; note = 2'-O methyl vinyl phosphonate uridine
  modified_base 2: mod_base = OTHER; note = 2'-fluoro ribonucleotide
  modified_base 3..13: mod_base = OTHER; note = 2'-O-methyl ribonucleotide
  modified_base 14: mod_base = OTHER; note = 2'-fluoro ribonucleotide
  modified_base 15..21: mod_base = OTHER; note = 2'-O-methyl ribonucleotide
  modified_base 1..3: mod_base = OTHER; note = phosphorothioate linkage
  modified_base 19..21: mod_base = OTHER; note = phosphorothioate linkage
tcagtctcctgctgatggatt

SEQ ID NO: 2029 - RNA, 21 nt, synthetic construct
  source 1..21: mol_type = other RNA
  modified_base 1: mod_base = OTHER; note = 2'-O methyl vinyl phosphonate uridine
  modified_base 2: mod_base = OTHER; note = 2'-fluoro ribonucleotide
  modified_base 3..13: mod_base = OTHER; note = 2'-O-methyl ribonucleotide
  modified_base 14: mod_base = OTHER; note = 2'-fluoro ribonucleotide
  modified_base 15..21: mod_base = OTHER; note = 2'-O-methyl ribonucleotide
  modified_base 1..3: mod_base = OTHER; note = phosphorothioate linkage
  modified_base 19..21: mod_base = OTHER; note = phosphorothioate linkage
tagccagtctcctgctgattt

SEQ ID NO: 2030 - RNA, 21 nt, synthetic construct
  source 1..21: mol_type = other RNA
  modified_base 1: mod_base = OTHER; note = 2'-O methyl vinyl phosphonate uridine
  modified_base 2: mod_base = OTHER; note = 2'-fluoro ribonucleotide
  modified_base 3..13: mod_base = OTHER; note = 2'-O-methyl ribonucleotide
  modified_base 14: mod_base = OTHER; note = 2'-fluoro ribonucleotide
  modified_base 15..21: mod_base = OTHER; note = 2'-O-methyl ribonucleotide
  modified_base 1..3: mod_base = OTHER; note = phosphorothioate linkage
  modified_base 19..21: mod_base = OTHER; note = phosphorothioate linkage
ttagccagtctcctgctgatt

SEQ ID NO: 2031 - RNA, 21 nt, synthetic construct
  source 1..21: mol_type = other RNA
  modified_base 1: mod_base = OTHER; note = 2'-O methyl vinyl phosphonate uridine
  modified_base 2: mod_base = OTHER; note = 2'-fluoro ribonucleotide
  modified_base 3..13: mod_base = OTHER; note = 2'-O-methyl ribonucleotide
  modified_base 14: mod_base = OTHER; note = 2'-fluoro ribonucleotide
  modified_base 15..21: mod_base = OTHER; note = 2'-O-methyl ribonucleotide
  modified_base 1..3: mod_base = OTHER; note = phosphorothioate linkage
  modified_base 19..21: mod_base = OTHER; note = phosphorothioate linkage
ttttatttagccagtctcctt

SEQ ID NO: 2032 - RNA, 21 nt, synthetic construct
  source 1..21: mol_type = other RNA
  modified_base 1: mod_base = OTHER; note = 2'-O methyl vinyl phosphonate uridine
  modified_base 2: mod_base = OTHER; note = 2'-fluoro ribonucleotide
  modified_base 3..13: mod_base = OTHER; note = 2'-O-methyl ribonucleotide
  modified_base 14: mod_base = OTHER; note = 2'-fluoro ribonucleotide
  modified_base 15..21: mod_base = OTHER; note = 2'-O-methyl ribonucleotide
  modified_base 1..3: mod_base = OTHER; note = phosphorothioate linkage
  modified_base 19..21: mod_base = OTHER; note = phosphorothioate linkage
taattttatttagccagtctt

SEQ ID NO: 2033 - RNA, 21 nt, synthetic construct
  source 1..21: mol_type = other RNA
  modified_base 1: mod_base = OTHER; note = 2'-O methyl vinyl phosphonate uridine
  modified_base 2: mod_base = OTHER; note = 2'-fluoro ribonucleotide
  modified_base 3..13: mod_base = OTHER; note = 2'-O-methyl ribonucleotide
  modified_base 14: mod_base = OTHER; note = 2'-fluoro ribonucleotide
  modified_base 15..21: mod_base = OTHER; note = 2'-O-methyl ribonucleotide
  modified_base 1..3: mod_base = OTHER; note = phosphorothioate linkage
  modified_base 19..21: mod_base = OTHER; note = phosphorothioate linkage
tctaattttatttagccagtt

SEQ ID NO: 2034 - RNA, 21 nt, synthetic construct
  source 1..21: mol_type = other RNA
  modified_base 1: mod_base = OTHER; note = 2'-O methyl vinyl phosphonate uridine
  modified_base 2: mod_base = OTHER; note = 2'-fluoro ribonucleotide
  modified_base 3..13: mod_base = OTHER; note = 2'-O-methyl ribonucleotide
  modified_base 14: mod_base = OTHER; note = 2'-fluoro ribonucleotide
  modified_base 15..21: mod_base = OTHER; note = 2'-O-methyl ribonucleotide
  modified_base 1..3: mod_base = OTHER; note = phosphorothioate linkage
  modified_base 19..21: mod_base = OTHER; note = phosphorothioate linkage
ttctaattttatttagccatt

SEQ ID NO: 2035 - RNA, 21 nt, synthetic construct
  source 1..21: mol_type = other RNA
  modified_base 1: mod_base = OTHER; note = 2'-O methyl vinyl phosphonate uridine
  modified_base 2: mod_base = OTHER; note = 2'-fluoro ribonucleotide
  modified_base 3..13: mod_base = OTHER; note = 2'-O-methyl ribonucleotide
  modified_base 14: mod_base = OTHER; note = 2'-fluoro ribonucleotide
  modified_base 15..21: mod_base = OTHER; note = 2'-O-methyl ribonucleotide
  modified_base 1..3: mod_base = OTHER; note = phosphorothioate linkage
  modified_base 19..21: mod_base = OTHER; note = phosphorothioate linkage
tttctaattttatttagcctt

SEQ ID NO: 2036 - RNA, 21 nt, synthetic construct
  source 1..21: mol_type = other RNA
  modified_base 1: mod_base = OTHER; note = 2'-O methyl vinyl phosphonate uridine
  modified_base 2: mod_base = OTHER; note = 2'-fluoro ribonucleotide
  modified_base 3..13: mod_base = OTHER; note = 2'-O-methyl ribonucleotide
  modified_base 14: mod_base = OTHER; note = 2'-fluoro ribonucleotide
  modified_base 15..21: mod_base = OTHER; note = 2'-O-methyl ribonucleotide
  modified_base 1..3: mod_base = OTHER; note = phosphorothioate linkage
  modified_base 19..21: mod_base = OTHER; note = phosphorothioate linkage
tattctaattttatttagctt

SEQ ID NO: 2037 - RNA, 21 nt, synthetic construct
  source 1..21: mol_type = other RNA
  modified_base 1: mod_base = OTHER; note = 2'-O methyl vinyl phosphonate uridine
  modified_base 2: mod_base = OTHER; note = 2'-fluoro ribonucleotide
  modified_base 3..13: mod_base = OTHER; note = 2'-O-methyl ribonucleotide
  modified_base 14: mod_base = OTHER; note = 2'-fluoro ribonucleotide
  modified_base 15..21: mod_base = OTHER; note = 2'-O-methyl ribonucleotide
  modified_base 1..3: mod_base = OTHER; note = phosphorothioate linkage
  modified_base 19..21: mod_base = OTHER; note = phosphorothioate linkage
ttatattctaattttattttt

SEQ ID NO: 2038 - RNA, 21 nt, synthetic construct
  source 1..21: mol_type = other RNA
  modified_base 1: mod_base = OTHER; note = 2'-O methyl vinyl phosphonate uridine
  modified_base 2: mod_base = OTHER; note = 2'-fluoro ribonucleotide
  modified_base 3..13: mod_base = OTHER; note = 2'-O-methyl ribonucleotide
  modified_base 14: mod_base = OTHER; note = 2'-fluoro ribonucleotide
  modified_base 15..21: mod_base = OTHER; note = 2'-O-methyl ribonucleotide
  modified_base 1..3: mod_base = OTHER; note = phosphorothioate linkage
  modified_base 19..21: mod_base = OTHER; note = phosphorothioate linkage
taatatattctaattttattt

SEQ ID NO: 2039-2041 - skipped (3 entries)

SEQ ID NO: 2042 - RNA, 21 nt, synthetic construct
  source 1..21: mol_type = other RNA
  modified_base 1: mod_base = OTHER; note = 2'-O methyl vinyl phosphonate uridine
  modified_base 2: mod_base = OTHER; note = 2'-fluoro ribonucleotide
  modified_base 3..13: mod_base = OTHER; note = 2'-O-methyl ribonucleotide
  modified_base 14: mod_base = OTHER; note = 2'-fluoro ribonucleotide
  modified_base 15..21: mod_base = OTHER; note = 2'-O-methyl ribonucleotide
  modified_base 1..3: mod_base = OTHER; note = phosphorothioate linkage
  modified_base 19..21: mod_base = OTHER; note = phosphorothioate linkage
ttgcactgagatgcgactctt

SEQ ID NO: 2043 - RNA, 21 nt, synthetic construct
  source 1..21: mol_type = other RNA
  modified_base 1: mod_base = OTHER; note = 2'-O methyl vinyl phosphonate uridine
  modified_base 2: mod_base = OTHER; note = 2'-fluoro ribonucleotide
  modified_base 3..13: mod_base = OTHER; note = 2'-O-methyl ribonucleotide
  modified_base 14: mod_base = OTHER; note = 2'-fluoro ribonucleotide
  modified_base 15..21: mod_base = OTHER; note = 2'-O-methyl ribonucleotide
  modified_base 1..3: mod_base = OTHER; note = phosphorothioate linkage
  modified_base 19..21: mod_base = OTHER; note = phosphorothioate linkage
tcctgcactgagatgcgactt

SEQ ID NO: 2044 - RNA, 21 nt, synthetic construct
  source 1..21: mol_type = other RNA
  modified_base 1: mod_base = OTHER; note = 2'-O methyl vinyl phosphonate uridine
  modified_base 2: mod_base = OTHER; note = 2'-fluoro ribonucleotide
  modified_base 3..13: mod_base = OTHER; note = 2'-O-methyl ribonucleotide
  modified_base 14: mod_base = OTHER; note = 2'-fluoro ribonucleotide
  modified_base 15..21: mod_base = OTHER; note = 2'-O-methyl ribonucleotide
  modified_base 1..3: mod_base = OTHER; note = phosphorothioate linkage
  modified_base 19..21: mod_base = OTHER; note = phosphorothioate linkage
tggtgaagtgagaggttcttt

SEQ ID NO: 2045 - RNA, 21 nt, synthetic construct
  source 1..21: mol_type = other RNA
  modified_base 1: mod_base = OTHER; note = 2'-O methyl vinyl phosphonate uridine
  modified_base 2: mod_base = OTHER; note = 2'-fluoro ribonucleotide
  modified_base 3..13: mod_base = OTHER; note = 2'-O-methyl ribonucleotide
  modified_base 14: mod_base = OTHER; note = 2'-fluoro ribonucleotide
  modified_base 15..21: mod_base = OTHER; note = 2'-O-methyl ribonucleotide
  modified_base 1..3: mod_base = OTHER; note = phosphorothioate linkage
  modified_base 19..21: mod_base = OTHER; note = phosphorothioate linkage
tatttagccagtctcctgctt

SEQ ID NO: 2046 - RNA, 21 nt, synthetic construct
  source 1..21: mol_type = other RNA
  modified_base 1: mod_base = OTHER; note = 2'-O methyl vinyl phosphonate uridine
  modified_base 2: mod_base = OTHER; note = 2'-fluoro ribonucleotide
  modified_base 3..13: mod_base = OTHER; note = 2'-O-methyl ribonucleotide
  modified_base 14: mod_base = OTHER; note = 2'-fluoro ribonucleotide
  modified_base 15..21: mod_base = OTHER; note = 2'-O-methyl ribonucleotide
  modified_base 1..3: mod_base = OTHER; note = phosphorothioate linkage
  modified_base 19..21: mod_base = OTHER; note = phosphorothioate linkage
ttgtttattaggtactgtttt

SEQ ID NO: 2047 - RNA, 21 nt, synthetic construct
  source 1..21: mol_type = other RNA
  modified_base 1: mod_base = OTHER; note = 2'-O methyl vinyl phosphonate uridine
  modified_base 2: mod_base = OTHER; note = 2'-fluoro ribonucleotide
  modified_base 3: mod_base = OTHER; note = 2'-O-methyl ribonucleotide
  modified_base 4: mod_base = OTHER; note = 2'-fluoro ribonucleotide
  modified_base 5: mod_base = OTHER; note = 2'-O-methyl ribonucleotide
  modified_base 6: mod_base = OTHER; note = 2'-fluoro ribonucleotide
  modified_base 7: mod_base = OTHER; note = 2'-O-methyl ribonucleotide
  modified_base 8: mod_base = OTHER; note = 2'-fluoro ribonucleotide
  modified_base 9: mod_base = OTHER; note = 2'-O-methyl ribonucleotide
  modified_base 10: mod_base = OTHER; note = 2'-fluoro ribonucleotide
  modified_base 11: mod_base = OTHER; note = 2'-O-methyl ribonucleotide
  modified_base 12: mod_base = OTHER; note = 2'-fluoro ribonucleotide
  modified_base 13: mod_base = OTHER; note = 2'-O-methyl ribonucleotide
  modified_base 14: mod_base = OTHER; note = 2'-fluoro ribonucleotide
  modified_base 15: mod_base = OTHER; note = 2'-O-methyl ribonucleotide
  modified_base 16: mod_base = OTHER; note = 2'-fluoro ribonucleotide
  modified_base 17: mod_base = OTHER; note = 2'-O-methyl ribonucleotide
  modified_base 18: mod_base = OTHER; note = 2'-fluoro ribonucleotide
  modified_base 19..21: mod_base = OTHER; note = 2'-O-methyl ribonucleotide
  modified_base 1..3: mod_base = OTHER; note = phosphorothioate linkage
  modified_base 19..21: mod_base = OTHER; note = phosphorothioate linkage
tcctgcactgagatgcgactt

SEQ ID NO: 2048 - RNA, 21 nt, synthetic construct
  source 1..21: mol_type = other RNA
  modified_base 1: mod_base = OTHER; note = 2'-O methyl vinyl phosphonate uridine
  modified_base 2: mod_base = OTHER; note = 2'-fluoro ribonucleotide
  modified_base 3: mod_base = OTHER; note = 2'-O-methyl ribonucleotide
  modified_base 4: mod_base = OTHER; note = 2'-fluoro ribonucleotide
  modified_base 5: mod_base = OTHER; note = 2'-O-methyl ribonucleotide
  modified_base 6..8: mod_base = OTHER; note = 2'-fluoro ribonucleotide
  modified_base 9: mod_base = OTHER; note = 2'-O-methyl ribonucleotide
  modified_base 10: mod_base = OTHER; note = 2'-fluoro ribonucleotide
  modified_base 11..13: mod_base = OTHER; note = 2'-O-methyl ribonucleotide
  modified_base 14: mod_base = OTHER; note = 2'-fluoro ribonucleotide
  modified_base 15: mod_base = OTHER; note = 2'-O-methyl ribonucleotide
  modified_base 16: mod_base = OTHER; note = 2'-fluoro ribonucleotide
  modified_base 17: mod_base = OTHER; note = 2'-O-methyl ribonucleotide
  modified_base 18: mod_base = OTHER; note = 2'-fluoro ribonucleotide
  modified_base 19: mod_base = OTHER; note = 2'-O-methyl ribonucleotide
  modified_base 20: mod_base = OTHER; note = 2'-fluoro ribonucleotide
  modified_base 21: mod_base = OTHER; note = 2'-O-methyl ribonucleotide
  modified_base 1..3: mod_base = OTHER; note = phosphorothioate linkage
  modified_base 19..21: mod_base = OTHER; note = phosphorothioate linkage
tcctgcactgagatgcgactt

SEQ ID NO: 2049 - RNA, 21 nt, synthetic construct
  source 1..21: mol_type = other RNA
  modified_base 1: mod_base = OTHER; note = 2'-O methyl vinyl phosphonate uridine
  modified_base 2: mod_base = OTHER; note = 2'-fluoro ribonucleotide
  modified_base 3..13: mod_base = OTHER; note = 2'-O-methyl ribonucleotide
  modified_base 14: mod_base = OTHER; note = 2'-fluoro ribonucleotide
  modified_base 15..21: mod_base = OTHER; note = 2'-O-methyl ribonucleotide
  modified_base 1..3: mod_base = OTHER; note = phosphorothioate linkage
  modified_base 19..21: mod_base = OTHER; note = phosphorothioate linkage
tgggtgaagtgagaggttctt

SEQ ID NO: 2050 - RNA, 21 nt, synthetic construct
  source 1..21: mol_type = other RNA
  modified_base 1: mod_base = OTHER; note = 2'-O methyl vinyl phosphonate uridine
  modified_base 2: mod_base = OTHER; note = 2'-fluoro ribonucleotide
  modified_base 3..13: mod_base = OTHER; note = 2'-O-methyl ribonucleotide
  modified_base 14: mod_base = OTHER; note = 2'-fluoro ribonucleotide
  modified_base 15..21: mod_base = OTHER; note = 2'-O-methyl ribonucleotide
  modified_base 1..3: mod_base = OTHER; note = phosphorothioate linkage
  modified_base 19..21: mod_base = OTHER; note = phosphorothioate linkage
tatttagccagtctcctgctt

SEQ ID NO: 2051 - RNA, 21 nt, synthetic construct
  source 1..21: mol_type = other RNA
  modified_base 1: mod_base = OTHER; note = 2'-O methyl vinyl phosphonate uridine
  modified_base 2: mod_base = OTHER; note = 2'-fluoro ribonucleotide
  modified_base 3..13: mod_base = OTHER; note = 2'-O-methyl ribonucleotide
  modified_base 14: mod_base = OTHER; note = 2'-fluoro ribonucleotide
  modified_base 15..21: mod_base = OTHER; note = 2'-O-methyl ribonucleotide
  modified_base 1..3: mod_base = OTHER; note = phosphorothioate linkage
  modified_base 19..21: mod_base = OTHER; note = phosphorothioate linkage
ttcaaggtgaactgtttcttt

SEQ ID NO: 2052 - RNA, 21 nt, synthetic construct
  source 1..21: mol_type = other RNA
  modified_base 1: mod_base = OTHER; note = 2'-O methyl vinyl phosphonate uridine
  modified_base 2: mod_base = OTHER; note = 2'-fluoro ribonucleotide
  modified_base 3..13: mod_base = OTHER; note = 2'-O-methyl ribonucleotide
  modified_base 14: mod_base = OTHER; note = 2'-fluoro ribonucleotide
  modified_base 15..21: mod_base = OTHER; note = 2'-O-methyl ribonucleotide
  modified_base 1..3: mod_base = OTHER; note = phosphorothioate linkage
  modified_base 19..21: mod_base = OTHER; note = phosphorothioate linkage
tttcaaggtgaactgtttctt

SEQ ID NO: 2053 - RNA, 21 nt, synthetic construct
  source 1..21: mol_type = other RNA
  modified_base 1: mod_base = OTHER; note = 2'-O methyl vinyl phosphonate uridine
  modified_base 2: mod_base = OTHER; note = 2'-fluoro ribonucleotide
  modified_base 3..13: mod_base = OTHER; note = 2'-O-methyl ribonucleotide
  modified_base 14: mod_base = OTHER; note = 2'-fluoro ribonucleotide
  modified_base 15..21: mod_base = OTHER; note = 2'-O-methyl ribonucleotide
  modified_base 1..3: mod_base = OTHER; note = phosphorothioate linkage
  modified_base 19..21: mod_base = OTHER; note = phosphorothioate linkage
tttcaaggtgaactgtttctt

SEQ ID NO: 2054 - RNA, 21 nt, synthetic construct
  source 1..21: mol_type = other RNA
  modified_base 1: mod_base = OTHER; note = 2'-O methyl vinyl phosphonate uridine
  modified_base 2: mod_base = OTHER; note = 2'-fluoro ribonucleotide
  modified_base 3..13: mod_base = OTHER; note = 2'-O-methyl ribonucleotide
  modified_base 14: mod_base = OTHER; note = 2'-fluoro ribonucleotide
  modified_base 15..21: mod_base = OTHER; note = 2'-O-methyl ribonucleotide
  modified_base 1..3: mod_base = OTHER; note = phosphorothioate linkage
  modified_base 19..21: mod_base = OTHER; note = phosphorothioate linkage
tcagggtgaagtgagaggttt

SEQ ID NO: 2055 - RNA, 21 nt, synthetic construct
  source 1..21: mol_type = other RNA
  modified_base 1: mod_base = OTHER; note = 2'-O methyl vinyl phosphonate uridine
  modified_base 2: mod_base = OTHER; note = 2'-fluoro ribonucleotide
  modified_base 3..13: mod_base = OTHER; note = 2'-O-methyl ribonucleotide
  modified_base 14: mod_base = OTHER; note = 2'-fluoro ribonucleotide
  modified_base 15..21: mod_base = OTHER; note = 2'-O-methyl ribonucleotide
  modified_base 1..3: mod_base = OTHER; note = phosphorothioate linkage
  modified_base 19..21: mod_base = OTHER; note = phosphorothioate linkage
ttgggctccagggtgaagttt

SEQ ID NO: 2056 - RNA, 21 nt, synthetic construct
  source 1..21: mol_type = other RNA
  modified_base 1: mod_base = OTHER; note = 2'-O methyl vinyl phosphonate uridine
  modified_base 2: mod_base = OTHER; note = 2'-fluoro ribonucleotide
  modified_base 3..13: mod_base = OTHER; note = 2'-O-methyl ribonucleotide
  modified_base 14: mod_base = OTHER; note = 2'-fluoro ribonucleotide
  modified_base 15..21: mod_base = OTHER; note = 2'-O-methyl ribonucleotide
  modified_base 1..3: mod_base = OTHER; note = phosphorothioate linkage
  modified_base 19..21: mod_base = OTHER; note = phosphorothioate linkage
tttcaaggtgaactgtttctt

SEQ ID NO: 2057 - RNA, 21 nt, synthetic construct
  source 1..21: mol_type = other RNA
  modified_base 1: mod_base = OTHER; note = 2'-O methyl vinyl phosphonate uridine
  modified_base 2: mod_base = OTHER; note = 2'-fluoro ribonucleotide
  modified_base 3..13: mod_base = OTHER; note = 2'-O-methyl ribonucleotide
  modified_base 14: mod_base = OTHER; note = 2'-fluoro ribonucleotide
  modified_base 15..21: mod_base = OTHER; note = 2'-O-methyl ribonucleotide
  modified_base 1..3: mod_base = OTHER; note = phosphorothioate linkage
  modified_base 19..21: mod_base = OTHER; note = phosphorothioate linkage
tcctgcactgagatgcgactt

SEQ ID NO: 2058 - RNA, 21 nt, synthetic construct
  source 1..21: mol_type = other RNA
  modified_base 1: mod_base = OTHER; note = 2'-O methyl vinyl phosphonate uridine
  modified_base 2: mod_base = OTHER; note = 2'-fluoro ribonucleotide
  modified_base 3..13: mod_base = OTHER; note = 2'-O-methyl ribonucleotide
  modified_base 14: mod_base = OTHER; note = 2'-fluoro ribonucleotide
  modified_base 15..21: mod_base = OTHER; note = 2'-O-methyl ribonucleotide
  modified_base 1..3: mod_base = OTHER; note = phosphorothioate linkage
  modified_base 19..21: mod_base = OTHER; note = phosphorothioate linkage
tcctgcactgagatgcgactt

SEQ ID NO: 2059 - RNA, 21 nt, synthetic construct
  source 1..21: mol_type = other RNA
  modified_base 1: mod_base = OTHER; note = 2'-O methyl vinyl phosphonate uridine
  modified_base 2: mod_base = OTHER; note = 2'-fluoro ribonucleotide
  modified_base 3..13: mod_base = OTHER; note = 2'-O-methyl ribonucleotide
  modified_base 14: mod_base = OTHER; note = 2'-fluoro ribonucleotide
  modified_base 15..21: mod_base = OTHER; note = 2'-O-methyl ribonucleotide
  modified_base 1..3: mod_base = OTHER; note = phosphorothioate linkage
  modified_base 19..21: mod_base = OTHER; note = phosphorothioate linkage
tcctgcactgagatgcgactt

SEQ ID NO: 2060 - RNA, 21 nt, synthetic construct
  source 1..21: mol_type = other RNA
  modified_base 1: mod_base = OTHER; note = 2'-O methyl vinyl phosphonate uridine
  modified_base 2: mod_base = OTHER; note = 2'-fluoro ribonucleotide
  modified_base 3..13: mod_base = OTHER; note = 2'-O-methyl ribonucleotide
  modified_base 14: mod_base = OTHER; note = 2'-fluoro ribonucleotide
  modified_base 15..21: mod_base = OTHER; note = 2'-O-methyl ribonucleotide
  modified_base 1..3: mod_base = OTHER; note = phosphorothioate linkage
  modified_base 19..21: mod_base = OTHER; note = phosphorothioate linkage
tcctgcactgagatgcgactt

SEQ ID NO: 2061 - RNA, 21 nt, synthetic construct
  source 1..21: mol_type = other RNA
  modified_base 1: mod_base = OTHER; note = 2'-O methyl vinyl phosphonate uridine
  modified_base 2: mod_base = OTHER; note = 2'-fluoro ribonucleotide
  modified_base 3..13: mod_base = OTHER; note = 2'-O-methyl ribonucleotide
  modified_base 14: mod_base = OTHER; note = 2'-fluoro ribonucleotide
  modified_base 15..21: mod_base = OTHER; note = 2'-O-methyl ribonucleotide
  modified_base 1..3: mod_base = OTHER; note = phosphorothioate linkage
  modified_base 19..21: mod_base = OTHER; note = phosphorothioate linkage
tcctgcactgagatgcgactt

SEQ ID NO: 2062 - RNA, 21 nt, synthetic construct
  source 1..21: mol_type = other RNA
  modified_base 1: mod_base = OTHER; note = 2'-O methyl vinyl phosphonate uridine
  modified_base 2: mod_base = OTHER; note = 2'-fluoro ribonucleotide
  modified_base 3..13: mod_base = OTHER; note = 2'-O-methyl ribonucleotide
  modified_base 14: mod_base = OTHER; note = 2'-fluoro ribonucleotide
  modified_base 15..21: mod_base = OTHER; note = 2'-O-methyl ribonucleotide
  modified_base 1..3: mod_base = OTHER; note = phosphorothioate linkage
  modified_base 19..21: mod_base = OTHER; note = phosphorothioate linkage
tcctgcactgagatgcgactt

SEQ ID NO: 2063 - RNA, 21 nt, synthetic construct
  source 1..21: mol_type = other RNA
  modified_base 1: mod_base = OTHER; note = 2'-O methyl vinyl phosphonate uridine
  modified_base 2: mod_base = OTHER; note = 2'-fluoro ribonucleotide
  modified_base 3..13: mod_base = OTHER; note = 2'-O-methyl ribonucleotide
  modified_base 14: mod_base = OTHER; note = 2'-fluoro ribonucleotide
  modified_base 15..21: mod_base = OTHER; note = 2'-O-methyl ribonucleotide
  modified_base 1..3: mod_base = OTHER; note = phosphorothioate linkage
  modified_base 19..21: mod_base = OTHER; note = phosphorothioate linkage
tcctgcactgagatgcgactt

SEQ ID NO: 2064 - RNA, 21 nt, synthetic construct
  source 1..21: mol_type = other RNA
  modified_base 1: mod_base = OTHER; note = 2'-O methyl vinyl phosphonate uridine
  modified_base 2: mod_base = OTHER; note = 2'-fluoro ribonucleotide
  modified_base 3..13: mod_base = OTHER; note = 2'-O-methyl ribonucleotide
  modified_base 14: mod_base = OTHER; note = 2'-fluoro ribonucleotide
  modified_base 15..21: mod_base = OTHER; note = 2'-O-methyl ribonucleotide
  modified_base 1..3: mod_base = OTHER; note = phosphorothioate linkage
  modified_base 19..21: mod_base = OTHER; note = phosphorothioate linkage
tttcaaggtgaactgtttctt

SEQ ID NO: 2065 - RNA, 21 nt, synthetic construct
  source 1..21: mol_type = other RNA
  modified_base 1: mod_base = OTHER; note = 2'-O methyl vinyl phosphonate uridine
  modified_base 2: mod_base = OTHER; note = 2'-fluoro ribonucleotide
  modified_base 3..13: mod_base = OTHER; note = 2'-O-methyl ribonucleotide
  modified_base 14: mod_base = OTHER; note = 2'-fluoro ribonucleotide
  modified_base 15..21: mod_base = OTHER; note = 2'-O-methyl ribonucleotide
  modified_base 1..3: mod_base = OTHER; note = phosphorothioate linkage
  modified_base 19..21: mod_base = OTHER; note = phosphorothioate linkage
tttcaaggtgaactgtttctt

SEQ ID NO: 2066 - RNA, 21 nt, synthetic construct
  source 1..21: mol_type = other RNA
  modified_base 1: mod_base = OTHER; note = 2'-O methyl vinyl phosphonate uridine
  modified_base 2: mod_base = OTHER; note = 2'-fluoro ribonucleotide
  modified_base 3..13: mod_base = OTHER; note = 2'-O-methyl ribonucleotide
  modified_base 14: mod_base = OTHER; note = 2'-fluoro ribonucleotide
  modified_base 15..21: mod_base = OTHER; note = 2'-O-methyl ribonucleotide
  modified_base 1..3: mod_base = OTHER; note = phosphorothioate linkage
  modified_base 19..21: mod_base = OTHER; note = phosphorothioate linkage
tttcaaggtgaactgtttctt

SEQ ID NO: 2067 - RNA, 21 nt, synthetic construct
  source 1..21: mol_type = other RNA
  modified_base 1: mod_base = OTHER; note = 2'-O methyl vinyl phosphonate uridine
  modified_base 2: mod_base = OTHER; note = 2'-fluoro ribonucleotide
  modified_base 3..13: mod_base = OTHER; note = 2'-O-methyl ribonucleotide
  modified_base 14: mod_base = OTHER; note = 2'-fluoro ribonucleotide
  modified_base 15..21: mod_base = OTHER; note = 2'-O-methyl ribonucleotide
  modified_base 1..3: mod_base = OTHER; note = phosphorothioate linkage
  modified_base 19..21: mod_base = OTHER; note = phosphorothioate linkage
tttcaaggtgaactgtttctt

SEQ ID NO: 2068 - RNA, 21 nt, synthetic construct
  source 1..21: mol_type = other RNA
  modified_base 1: mod_base = OTHER; note = 2'-O methyl vinyl phosphonate uridine
  modified_base 2: mod_base = OTHER; note = 2'-fluoro ribonucleotide
  modified_base 3..13: mod_base = OTHER; note = 2'-O-methyl ribonucleotide
  modified_base 14: mod_base = OTHER; note = 2'-fluoro ribonucleotide
  modified_base 15..21: mod_base = OTHER; note = 2'-O-methyl ribonucleotide
  modified_base 1..3: mod_base = OTHER; note = phosphorothioate linkage
  modified_base 19..21: mod_base = OTHER; note = phosphorothioate linkage
tttcaaggtgaactgtttctt

SEQ ID NO: 2069 - RNA, 21 nt, synthetic construct
  source 1..21: mol_type = other RNA
  modified_base 1: mod_base = OTHER; note = 2'-O methyl vinyl phosphonate uridine
  modified_base 2: mod_base = OTHER; note = 2'-fluoro ribonucleotide
  modified_base 3..13: mod_base = OTHER; note = 2'-O-methyl ribonucleotide
  modified_base 14: mod_base = OTHER; note = 2'-fluoro ribonucleotide
  modified_base 15..21: mod_base = OTHER; note = 2'-O-methyl ribonucleotide
  modified_base 1..3: mod_base = OTHER; note = phosphorothioate linkage
  modified_base 19..21: mod_base = OTHER; note = phosphorothioate linkage
tcctgcactgagatgcgactt

SEQ ID NO: 2070 - RNA, 19 nt, synthetic construct
  source 1..19: mol_type = other RNA
agcaggagactggctaaaa

SEQ ID NO: 2071 - RNA, 19 nt, synthetic construct
  source 1..19: mol_type = other RNA
caggagactggctaaataa

SEQ ID NO: 2072-2109 - skipped (38 entries)

SEQ ID NO: 2110 - RNA, 19 nt, synthetic construct
  source 1..19: mol_type = other RNA
agaaacagttcaccttgaa

SEQ ID NO: 2111 - RNA, 19 nt, synthetic construct
  source 1..19: mol_type = other RNA
gaaacagttcaccttgaaa

SEQ ID NO: 2112 - RNA, 19 nt, synthetic construct
  source 1..19: mol_type = other RNA
aacctctcacttcacccta

SEQ ID NO: 2113 - RNA, 19 nt, synthetic construct
  source 1..19: mol_type = other RNA
acctctcacttcaccctga

SEQ ID NO: 2114 - RNA, 19 nt, synthetic construct
  source 1..19: mol_type = other RNA
cctctcacttcaccctgga

SEQ ID NO: 2115 - RNA, 19 nt, synthetic construct
  source 1..19: mol_type = other RNA
ctctcacttcaccctggaa

SEQ ID NO: 2116 - RNA, 19 nt, synthetic construct
  source 1..19: mol_type = other RNA
tctcacttcaccctggaga

SEQ ID NO: 2117 - RNA, 19 nt, synthetic construct
  source 1..19: mol_type = other RNA
ctcacttcaccctggagca

SEQ ID NO: 2118 - RNA, 19 nt, synthetic construct
  source 1..19: mol_type = other RNA
tcacttcaccctggagcca

SEQ ID NO: 2119 - RNA, 19 nt, synthetic construct
  source 1..19: mol_type = other RNA
cacttcaccctggagccca

SEQ ID NO: 2120 - RNA, 19 nt, synthetic construct
  source 1..19: mol_type = other RNA
acttcaccctggagcccaa

SEQ ID NO: 2121 - RNA, 19 nt, synthetic construct
  source 1..19: mol_type = other RNA
cttcaccctggagcccata

SEQ ID NO: 2122 - RNA, 19 nt, synthetic construct
  source 1..19: mol_type = other RNA
ttcaccctggagcccatca

SEQ ID NO: 2123 - RNA, 19 nt, synthetic construct
  source 1..19: mol_type = other RNA
tcaccctggagcccatcca

SEQ ID NO: 2124 - RNA, 19 nt, synthetic construct
  source 1..19: mol_type = other RNA
caccctggagcccatccaa

SEQ ID NO: 2125 - RNA, 19 nt, synthetic construct
  source 1..19: mol_type = other RNA
accctggagcccatccaga

SEQ ID NO: 2126 - RNA, 19 nt, synthetic construct
  source 1..19: mol_type = other RNA
ccctggagcccatccagta

SEQ ID NO: 2127 - RNA, 19 nt, synthetic construct
  source 1..19: mol_type = other RNA
cctggagcccatccagtca

SEQ ID NO: 2128 - RNA, 19 nt, synthetic construct
  source 1..19: mol_type = other RNA
ctggagcccatccagtcta

SEQ ID NO: 2129 - RNA, 19 nt, synthetic construct
  source 1..19: mol_type = other RNA
ctgcttaactgtccatcaa

SEQ ID NO: 2130 - RNA, 19 nt, synthetic construct
  source 1..19: mol_type = other RNA
tgcttaactgtccatcaga

SEQ ID NO: 2131 - RNA, 19 nt, synthetic construct
  source 1..19: mol_type = other RNA
gcttaactgtccatcagca

SEQ ID NO: 2132 - RNA, 19 nt, synthetic construct
  source 1..19: mol_type = other RNA
cttaactgtccatcagcaa

SEQ ID NO: 2133 - RNA, 19 nt, synthetic construct
  source 1..19: mol_type = other RNA
ttaactgtccatcagcaga

SEQ ID NO: 2134 - RNA, 19 nt, synthetic construct
  source 1..19: mol_type = other RNA
aactgtccatcagcaggaa

SEQ ID NO: 2135 - RNA, 19 nt, synthetic construct
  source 1..19: mol_type = other RNA
actgtccatcagcaggaga

SEQ ID NO: 2136 - RNA, 19 nt, synthetic construct
  source 1..19: mol_type = other RNA
ctgtccatcagcaggagaa

SEQ ID NO: 2137 - RNA, 19 nt, synthetic construct
  source 1..19: mol_type = other RNA
gtccatcagcaggagacta

SEQ ID NO: 2138 - RNA, 19 nt, synthetic construct
  source 1..19: mol_type = other RNA
tccatcagcaggagactga

SEQ ID NO: 2139 - RNA, 19 nt, synthetic construct
  source 1..19: mol_type = other RNA
atcagcaggagactggcta

SEQ ID NO: 2140 - RNA, 19 nt, synthetic construct
  source 1..19: mol_type = other RNA
tcagcaggagactggctaa

SEQ ID NO: 2141 - RNA, 19 nt, synthetic construct
  source 1..19: mol_type = other RNA
ggagactggctaaataaaa

SEQ ID NO: 2142 - RNA, 19 nt, synthetic construct
  source 1..19: mol_type = other RNA
gactggctaaataaaatta

SEQ ID NO: 2143 - RNA, 19 nt, synthetic construct
  source 1..19: mol_type = other RNA
ctggctaaataaaattaga

SEQ ID NO: 2144 - RNA, 19 nt, synthetic construct
  source 1..19: mol_type = other RNA
tggctaaataaaattagaa

SEQ ID NO: 2145 - RNA, 19 nt, synthetic construct
  source 1..19: mol_type = other RNA
ggctaaataaaattagaaa

SEQ ID NO: 2146 - RNA, 19 nt, synthetic construct
  source 1..19: mol_type = other RNA
gctaaataaaattagaata

SEQ ID NO: 2147 - RNA, 19 nt, synthetic construct
  source 1..19: mol_type = other RNA
aaataaaattagaatataa

SEQ ID NO: 2148 - RNA, 19 nt, synthetic construct
  source 1..19: mol_type = other RNA
ataaaattagaatatatta

SEQ ID NO: 2149-2151 - skipped (3 entries)

SEQ ID NO: 2152 - RNA, 19 nt, synthetic construct
  source 1..19: mol_type = other RNA
gagtcgcatctcagtgcaa

SEQ ID NO: 2153 - RNA, 19 nt, synthetic construct
  source 1..19: mol_type = other RNA
gtcgcatctcagtgcagga

SEQ ID NO: 2154 - RNA, 19 nt, synthetic construct
  source 1..19: mol_type = other RNA
agaacctctcacttcacca

SEQ ID NO: 2155 - RNA, 19 nt, synthetic construct
  source 1..19: mol_type = other RNA
gcaggagactggctaaata

SEQ ID NO: 2156 - RNA, 19 nt, synthetic construct
  source 1..19: mol_type = other RNA
aacagtacctaataaacaa

SEQ ID NO: 2157 - RNA, 19 nt, synthetic construct
  source 1..19: mol_type = other RNA
gtcgcatctcagtgcagga

SEQ ID NO: 2158 - RNA, 19 nt, synthetic construct
  source 1..19: mol_type = other RNA
gtcgcatctcagtgcagga

SEQ ID NO: 2159 - RNA, 19 nt, synthetic construct
  source 1..19: mol_type = other RNA
gaacctctcacttcaccca

SEQ ID NO: 2160 - RNA, 19 nt, synthetic construct
  source 1..19: mol_type = other RNA
gcaggagactggctaaata

SEQ ID NO: 2161 - RNA, 19 nt, synthetic construct
  source 1..19: mol_type = other RNA
agaaacagttcaccttgaa

SEQ ID NO: 2162 - RNA, 19 nt, synthetic construct
  source 1..19: mol_type = other RNA
gaaacagttcaccttgaaa

SEQ ID NO: 2163 - RNA, 19 nt, synthetic construct
  source 1..19: mol_type = other RNA
gaaacagttcaccttgaaa

SEQ ID NO: 2164 - RNA, 19 nt, synthetic construct
  source 1..19: mol_type = other RNA
acctctcacttcaccctga

SEQ ID NO: 2165 - RNA, 19 nt, synthetic construct
  source 1..19: mol_type = other RNA
acttcaccctggagcccaa

SEQ ID NO: 2166 - RNA, 19 nt, synthetic construct
  source 1..19: mol_type = other RNA
gaaacagttcaccttgaaa

SEQ ID NO: 2167 - RNA, 19 nt, synthetic construct
  source 1..19: mol_type = other RNA
gtcgcatctcagtgcagga

SEQ ID NO: 2168 - RNA, 19 nt, synthetic construct
  source 1..19: mol_type = other RNA
gtcgcatctcagtgcagga

SEQ ID NO: 2169 - RNA, 19 nt, synthetic construct
  source 1..19: mol_type = other RNA
gtcgcatctcagtgcagga

SEQ ID NO: 2170 - RNA, 19 nt, synthetic construct
  source 1..19: mol_type = other RNA
gtcgcatctcagtgcagga

SEQ ID NO: 2171 - RNA, 19 nt, synthetic construct
  source 1..19: mol_type = other RNA
gtcgcatctcagtgcagga

SEQ ID NO: 2172 - RNA, 19 nt, synthetic construct
  source 1..19: mol_type = other RNA
gtcgcatctcagtgcagga

SEQ ID NO: 2173 - RNA, 19 nt, synthetic construct
  source 1..19: mol_type = other RNA
gtcgcatctcagtgcagga

SEQ ID NO: 2174 - RNA, 19 nt, synthetic construct
  source 1..19: mol_type = other RNA
gaaacagttcaccttgaaa

SEQ ID NO: 2175 - RNA, 19 nt, synthetic construct
  source 1..19: mol_type = other RNA
gaaacagttcaccttgaaa

SEQ ID NO: 2176 - RNA, 19 nt, synthetic construct
  source 1..19: mol_type = other RNA
gaaacagttcaccttgaaa

SEQ ID NO: 2177 - RNA, 19 nt, synthetic construct
  source 1..19: mol_type = other RNA
gaaacagttcaccttgaaa

SEQ ID NO: 2178 - RNA, 19 nt, synthetic construct
  source 1..19: mol_type = other RNA
gaaacagttcaccttgaaa

SEQ ID NO: 2179 - RNA, 19 nt, synthetic construct
  source 1..19: mol_type = other RNA
gtcgcatctcagtgcagga

SEQ ID NO: 2180 - RNA, 21 nt, synthetic construct
  source 1..21: mol_type = other RNA
ttttagccagtctcctgcttt

SEQ ID NO: 2181 - RNA, 21 nt, synthetic construct
  source 1..21: mol_type = other RNA
ttatttagccagtctcctgtt

SEQ ID NO: 2182-2219 - skipped (38 entries)

SEQ ID NO: 2220 - RNA, 21 nt, synthetic construct
  source 1..21: mol_type = other RNA
ttcaaggtgaactgtttcttt

SEQ ID NO: 2221 - RNA, 21 nt, synthetic construct
  source 1..21: mol_type = other RNA
tttcaaggtgaactgtttctt

SEQ ID NO: 2222 - RNA, 21 nt, synthetic construct
  source 1..21: mol_type = other RNA
tagggtgaagtgagaggtttt

SEQ ID NO: 2223 - RNA, 21 nt, synthetic construct
  source 1..21: mol_type = other RNA
tcagggtgaagtgagaggttt

SEQ ID NO: 2224 - RNA, 21 nt, synthetic construct
  source 1..21: mol_type = other RNA
tccagggtgaagtgagaggtt

SEQ ID NO: 2225 - RNA, 21 nt, synthetic construct
  source 1..21: mol_type = other RNA
ttccagggtgaagtgagagtt

SEQ ID NO: 2226 - RNA, 21 nt, synthetic construct
  source 1..21: mol_type = other RNA
tctccagggtgaagtgagatt

SEQ ID NO: 2227 - RNA, 21 nt, synthetic construct
  source 1..21: mol_type = other RNA
tgctccagggtgaagtgagtt

SEQ ID NO: 2228 - RNA, 21 nt, synthetic construct
  source 1..21: mol_type = other RNA
tggctccagggtgaagtgatt

SEQ ID NO: 2229 - RNA, 21 nt, synthetic construct
  source 1..21: mol_type = other RNA
tgggctccagggtgaagtgtt

SEQ ID NO: 2230 - RNA, 21 nt, synthetic construct
  source 1..21: mol_type = other RNA
ttgggctccagggtgaagttt

SEQ ID NO: 2231 - RNA, 21 nt, synthetic construct
  source 1..21: mol_type = other RNA
tatgggctccagggtgaagtt

SEQ ID NO: 2232 - RNA, 21 nt, synthetic construct
  source 1..21: mol_type = other RNA
tgatgggctccagggtgaatt

SEQ ID NO: 2233 - RNA, 21 nt, synthetic construct
  source 1..21: mol_type = other RNA
tggatgggctccagggtgatt

SEQ ID NO: 2234 - RNA, 21 nt, synthetic construct
  source 1..21: mol_type = other RNA
ttggatgggctccagggtgtt

SEQ ID NO: 2235 - RNA, 21 nt, synthetic construct
  source 1..21: mol_type = other RNA
tctggatgggctccagggttt

SEQ ID NO: 2236 - RNA, 21 nt, synthetic construct
  source 1..21: mol_type = other RNA
tactggatgggctccagggtt

SEQ ID NO: 2237 - RNA, 21 nt, synthetic construct
  source 1..21: mol_type = other RNA
tgactggatgggctccaggtt

SEQ ID NO: 2238 - RNA, 21 nt, synthetic construct
  source 1..21: mol_type = other RNA
tagactggatgggctccagtt

SEQ ID NO: 2239 - RNA, 21 nt, synthetic construct
  source 1..21: mol_type = other RNA
ttgatggacagttaagcagtt

SEQ ID NO: 2240 - RNA, 21 nt, synthetic construct
  source 1..21: mol_type = other RNA
tctgatggacagttaagcatt

SEQ ID NO: 2241 - RNA, 21 nt, synthetic construct
  source 1..21: mol_type = other RNA
tgctgatggacagttaagctt

SEQ ID NO: 2242 - RNA, 21 nt, synthetic construct
  source 1..21: mol_type = other RNA
ttgctgatggacagttaagtt

SEQ ID NO: 2243 - RNA, 21 nt, synthetic construct
  source 1..21: mol_type = other RNA
tctgctgatggacagttaatt

SEQ ID NO: 2244 - RNA, 21 nt, synthetic construct
  source 1..21: mol_type = other RNA
ttcctgctgatggacagtttt

SEQ ID NO: 2245 - RNA, 21 nt, synthetic construct
  source 1..21: mol_type = other RNA
tctcctgctgatggacagttt

SEQ ID NO: 2246 - RNA, 21 nt, synthetic construct
  source 1..21: mol_type = other RNA
ttctcctgctgatggacagtt

SEQ ID NO: 2247 - RNA, 21 nt, synthetic construct
  source 1..21: mol_type = other RNA
tagtctcctgctgatggactt

SEQ ID NO: 2248 - RNA, 21 nt, synthetic construct
  source 1..21: mol_type = other RNA
tcagtctcctgctgatggatt

SEQ ID NO: 2249 - RNA, 21 nt, synthetic construct
  source 1..21: mol_type = other RNA
tagccagtctcctgctgattt

SEQ ID NO: 2250 - RNA, 21 nt, synthetic construct
  source 1..21: mol_type = other RNA
ttagccagtctcctgctgatt

SEQ ID NO: 2251 - RNA, 21 nt, synthetic construct
  source 1..21: mol_type = other RNA
ttttatttagccagtctcctt

SEQ ID NO: 2252 - RNA, 21 nt, synthetic construct
  source 1..21: mol_type = other RNA
taattttatttagccagtctt

SEQ ID NO: 2253 - RNA, 21 nt, synthetic construct
  source 1..21: mol_type = other RNA
tctaattttatttagccagtt

SEQ ID NO: 2254 - RNA, 21 nt, synthetic construct
  source 1..21: mol_type = other RNA
ttctaattttatttagccatt

SEQ ID NO: 2255 - RNA, 21 nt, synthetic construct
  source 1..21: mol_type = other RNA
tttctaattttatttagcctt

SEQ ID NO: 2256 - RNA, 21 nt, synthetic construct
  source 1..21: mol_type = other RNA
tattctaattttatttagctt

SEQ ID NO: 2257 - RNA, 21 nt, synthetic construct
  source 1..21: mol_type = other RNA
ttatattctaattttattttt

SEQ ID NO: 2258 - RNA, 21 nt, synthetic construct
  source 1..21: mol_type = other RNA
taatatattctaattttattt

SEQ ID NO: 2259-2261 - skipped (3 entries)

SEQ ID NO: 2262 - RNA, 21 nt, synthetic construct
  source 1..21: mol_type = other RNA
ttgcactgagatgcgactctt

SEQ ID NO: 2263 - RNA, 21 nt, synthetic construct
  source 1..21: mol_type = other RNA
tcctgcactgagatgcgactt

SEQ ID NO: 2264 - RNA, 21 nt, synthetic construct
  source 1..21: mol_type = other RNA
tggtgaagtgagaggttcttt

SEQ ID NO: 2265 - RNA, 21 nt, synthetic construct
  source 1..21: mol_type = other RNA
tatttagccagtctcctgctt

SEQ ID NO: 2266 - RNA, 21 nt, synthetic construct
  source 1..21: mol_type = other RNA
ttgtttattaggtactgtttt

SEQ ID NO: 2267 - RNA, 21 nt, synthetic construct
  source 1..21: mol_type = other RNA
tcctgcactgagatgcgactt

SEQ ID NO: 2268 - RNA, 21 nt, synthetic construct
  source 1..21: mol_type = other RNA
tcctgcactgagatgcgactt

SEQ ID NO: 2269 - RNA, 21 nt, synthetic construct
  source 1..21: mol_type = other RNA
tgggtgaagtgagaggttctt

SEQ ID NO: 2270 - RNA, 21 nt, synthetic construct
  source 1..21: mol_type = other RNA
tatttagccagtctcctgctt

SEQ ID NO: 2271 - RNA, 21 nt, synthetic construct
  source 1..21: mol_type = other RNA
ttcaaggtgaactgtttcttt

SEQ ID NO: 2272 - RNA, 21 nt, synthetic construct
  source 1..21: mol_type = other RNA
tttcaaggtgaactgtttctt

SEQ ID NO: 2273 - RNA, 21 nt, synthetic construct
  source 1..21: mol_type = other RNA
tttcaaggtgaactgtttctt

SEQ ID NO: 2274 - RNA, 21 nt, synthetic construct
  source 1..21: mol_type = other RNA
tcagggtgaagtgagaggttt

SEQ ID NO: 2275 - RNA, 21 nt, synthetic construct
  source 1..21: mol_type = other RNA
ttgggctccagggtgaagttt

SEQ ID NO: 2276 - RNA, 21 nt, synthetic construct
  source 1..21: mol_type = other RNA
tttcaaggtgaactgtttctt

SEQ ID NO: 2277 - RNA, 21 nt, synthetic construct
  source 1..21: mol_type = other RNA
tcctgcactgagatgcgactt

SEQ ID NO: 2278 - RNA, 21 nt, synthetic construct
  source 1..21: mol_type = other RNA
tcctgcactgagatgcgactt

SEQ ID NO: 2279 - RNA, 21 nt, synthetic construct
  source 1..21: mol_type = other RNA
tcctgcactgagatgcgactt

SEQ ID NO: 2280 - RNA, 21 nt, synthetic construct
  source 1..21: mol_type = other RNA
tcctgcactgagatgcgactt

SEQ ID NO: 2281 - RNA, 21 nt, synthetic construct
  source 1..21: mol_type = other RNA
tcctgcactgagatgcgactt

SEQ ID NO: 2282 - RNA, 21 nt, synthetic construct
  source 1..21: mol_type = other RNA
tcctgcactgagatgcgactt

SEQ ID NO: 2283 - RNA, 21 nt, synthetic construct
  source 1..21: mol_type = other RNA
tcctgcactgagatgcgactt

SEQ ID NO: 2284 - RNA, 21 nt, synthetic construct
  source 1..21: mol_type = other RNA
tttcaaggtgaactgtttctt

SEQ ID NO: 2285 - RNA, 21 nt, synthetic construct
  source 1..21: mol_type = other RNA
tttcaaggtgaactgtttctt

SEQ ID NO: 2286 - RNA, 21 nt, synthetic construct
  source 1..21: mol_type = other RNA
tttcaaggtgaactgtttctt

SEQ ID NO: 2287 - RNA, 21 nt, synthetic construct
  source 1..21: mol_type = other RNA
tttcaaggtgaactgtttctt

SEQ ID NO: 2288 - RNA, 21 nt, synthetic construct
  source 1..21: mol_type = other RNA
tttcaaggtgaactgtttctt

SEQ ID NO: 2289 - RNA, 21 nt, synthetic construct
  source 1..21: mol_type = other RNA
tcctgcactgagatgcgactt

SEQ ID NO: 2290 - RNA, 21 nt, synthetic construct
  source 1..21: mol_type = other RNA
  modified_base 1: mod_base = OTHER; note = 2'-O methyl vinyl phosphonate uridine
  modified_base 2: mod_base = OTHER; note = 2'-fluoro ribonucleotide
  modified_base 3..13: mod_base = OTHER; note = 2'-O-methyl ribonucleotide
  modified_base 14: mod_base = OTHER; note = 2'-fluoro ribonucleotide
  modified_base 15..21: mod_base = OTHER; note = 2'-O-methyl ribonucleotide
  modified_base 1..3: mod_base = OTHER; note = phosphorothioate linkage
  modified_base 19..21: mod_base = OTHER; note = phosphorothioate linkage
ttcaaggtgaactgtttcttt

SEQ ID NO: 2291 - RNA, 21 nt, synthetic construct
  source 1..21: mol_type = other RNA
  modified_base 1: mod_base = OTHER; note = 2'-O methyl vinyl phosphonate uridine
  modified_base 2: mod_base = OTHER; note = 2'-fluoro ribonucleotide
  modified_base 3..13: mod_base = OTHER; note = 2'-O-methyl ribonucleotide
  modified_base 14: mod_base = OTHER; note = 2'-fluoro ribonucleotide
  modified_base 15..21: mod_base = OTHER; note = 2'-O-methyl ribonucleotide
  modified_base 1..3: mod_base = OTHER; note = phosphorothioate linkage
  modified_base 19..21: mod_base = OTHER; note = phosphorothioate linkage
tttcaaggtgaactgtttctt

SEQ ID NO: 2292 - RNA, 21 nt, synthetic construct
  source 1..21: mol_type = other RNA
  modified_base 1: mod_base = OTHER; note = 2'-O methyl vinyl phosphonate uridine
  modified_base 2: mod_base = OTHER; note = 2'-fluoro ribonucleotide
  modified_base 3..13: mod_base = OTHER; note = 2'-O-methyl ribonucleotide
  modified_base 14: mod_base = OTHER; note = 2'-fluoro ribonucleotide
  modified_base 15..21: mod_base = OTHER; note = 2'-O-methyl ribonucleotide
  modified_base 1..3: mod_base = OTHER; note = phosphorothioate linkage
  modified_base 19..21: mod_base = OTHER; note = phosphorothioate linkage
tagggtgaagtgagaggtttt

SEQ ID NO: 2293 - RNA, 21 nt, synthetic construct
  source 1..21: mol_type = other RNA
  modified_base 1: mod_base = OTHER; note = 2'-O methyl vinyl phosphonate uridine
  modified_base 2: mod_base = OTHER; note = 2'-fluoro ribonucleotide
  modified_base 3..13: mod_base = OTHER; note = 2'-O-methyl ribonucleotide
  modified_base 14: mod_base = OTHER; note = 2'-fluoro ribonucleotide
  modified_base 15..21: mod_base = OTHER; note = 2'-O-methyl ribonucleotide
  modified_base 1..3: mod_base = OTHER; note = phosphorothioate linkage
  modified_base 19..21: mod_base = OTHER; note = phosphorothioate linkage
tcagggtgaagtgagaggttt

SEQ ID NO: 2294 - RNA, 21 nt, synthetic construct
  source 1..21: mol_type = other RNA
  modified_base 1: mod_base = OTHER; note = 2'-O methyl vinyl phosphonate uridine
  modified_base 2: mod_base = OTHER; note = 2'-fluoro ribonucleotide
  modified_base 3..13: mod_base = OTHER; note = 2'-O-methyl ribonucleotide
  modified_base 14: mod_base = OTHER; note = 2'-fluoro ribonucleotide
  modified_base 15..21: mod_base = OTHER; note = 2'-O-methyl ribonucleotide
  modified_base 1..3: mod_base = OTHER; note = phosphorothioate linkage
  modified_base 19..21: mod_base = OTHER; note = phosphorothioate linkage
tccagggtgaagtgagaggtt

SEQ ID NO: 2295 - RNA, 21 nt, synthetic construct
  source 1..21: mol_type = other RNA
  modified_base 1: mod_base = OTHER; note = 2'-O methyl vinyl phosphonate uridine
  modified_base 2: mod_base = OTHER; note = 2'-fluoro ribonucleotide
  modified_base 3..13: mod_base = OTHER; note = 2'-O-methyl ribonucleotide
  modified_base 14: mod_base = OTHER; note = 2'-fluoro ribonucleotide
  modified_base 15..21: mod_base = OTHER; note = 2'-O-methyl ribonucleotide
  modified_base 1..3: mod_base = OTHER; note = phosphorothioate linkage
  modified_base 19..21: mod_base = OTHER; note = phosphorothioate linkage
ttccagggtgaagtgagagtt

SEQ ID NO: 2296 - RNA, 21 nt, synthetic construct
  source 1..21: mol_type = other RNA
  modified_base 1: mod_base = OTHER; note = 2'-O methyl vinyl phosphonate uridine
  modified_base 2: mod_base = OTHER; note = 2'-fluoro ribonucleotide
  modified_base 3..13: mod_base = OTHER; note = 2'-O-methyl ribonucleotide
  modified_base 14: mod_base = OTHER; note = 2'-fluoro ribonucleotide
  modified_base 15..21: mod_base = OTHER; note = 2'-O-methyl ribonucleotide
  modified_base 1..3: mod_base = OTHER; note = phosphorothioate linkage
  modified_base 19..21: mod_base = OTHER; note = phosphorothioate linkage
tctccagggtgaagtgagatt

SEQ ID NO: 2297 - RNA, 21 nt, synthetic construct
  source 1..21: mol_type = other RNA
  modified_base 1: mod_base = OTHER; note = 2'-O methyl vinyl phosphonate uridine
  modified_base 2: mod_base = OTHER; note = 2'-fluoro ribonucleotide
  modified_base 3..13: mod_base = OTHER; note = 2'-O-methyl ribonucleotide
  modified_base 14: mod_base = OTHER; note = 2'-fluoro ribonucleotide
  modified_base 15..21: mod_base = OTHER; note = 2'-O-methyl ribonucleotide
  modified_base 1..3: mod_base = OTHER; note = phosphorothioate linkage
  modified_base 19..21: mod_base = OTHER; note = phosphorothioate linkage
tgctccagggtgaagtgagtt

SEQ ID NO: 2298 - RNA, 19 nt, synthetic construct
  source 1..19: mol_type = other RNA
  modified_base 1..2: mod_base = OTHER; note = 2'-O-methyl ribonucleotide
  modified_base 3: mod_base = OTHER; note = 2'-fluoro ribonucleotide
  modified_base 4..6: mod_base = OTHER; note = 2'-O-methyl ribonucleotide
  modified_base 7..9: mod_base = OTHER; note = 2'-fluoro ribonucleotide
  modified_base 10..11: mod_base = OTHER; note = 2'-O-methyl ribonucleotide
  modified_base 12: mod_base = OTHER; note = 2'-fluoro ribonucleotide
  modified_base 13..16: mod_base = OTHER; note = 2'-O-methyl ribonucleotide
  modified_base 17: mod_base = OTHER; note = 2'-fluoro ribonucleotide
  modified_base 18..19: mod_base = OTHER; note = 2'-O-methyl ribonucleotide
  modified_base 1..3: mod_base = OTHER; note = phosphorothioate linkage
aggagactggctaaataaa

SEQ ID NO: 2299 - RNA, 21 nt, synthetic construct
  source 1..21: mol_type = other RNA
  modified_base 1: mod_base = OTHER; note = 2'-O methyl vinyl phosphonate uridine
  modified_base 2: mod_base = OTHER; note = 2'-fluoro ribonucleotide
  modified_base 3..13: mod_base = OTHER; note = 2'-O-methyl ribonucleotide
  modified_base 14: mod_base = OTHER; note = 2'-fluoro ribonucleotide
  modified_base 15..21: mod_base = OTHER; note = 2'-O-methyl ribonucleotide
  modified_base 1..3: mod_base = OTHER; note = phosphorothioate linkage
  modified_base 19..21: mod_base = OTHER; note = phosphorothioate linkage
tttatttagccagtctccttt

SEQ ID NO: 2300 - RNA, 19 nt, synthetic construct
  source 1..19: mol_type = other RNA
aggagactggctaaataaa

SEQ ID NO: 2301 - RNA, 21 nt, synthetic construct
  source 1..21: mol_type = other RNA
tttatttagccagtctccttt

SEQ ID NO: 2302 - RNA, 19 nt, synthetic construct
  source 1..19: mol_type = other RNA
  modified_base 1: mod_base = OTHER; note = 2'-fluoro ribonucleotide
  modified_base 2: mod_base = OTHER; note = 2'-O-methyl ribonucleotide
  modified_base 3: mod_base = OTHER; note = 2'-fluoro ribonucleotide
  modified_base 4: mod_base = OTHER; note = 2'-O-methyl ribonucleotide
  modified_base 5: mod_base = OTHER; note = 2'-fluoro ribonucleotide
  modified_base 6: mod_base = OTHER; note = 2'-O-methyl ribonucleotide
  modified_base 7..9: mod_base = OTHER; note = 2'-fluoro ribonucleotide
  modified_base 10: mod_base = OTHER; note = 2'-O-methyl ribonucleotide
  modified_base 11: mod_base = OTHER; note = 2'-fluoro ribonucleotide
  modified_base 12..14: mod_base = OTHER; note = 2'-O-methyl ribonucleotide
  modified_base 15: mod_base = OTHER; note = 2'-fluoro ribonucleotide
  modified_base 16: mod_base = OTHER; note = 2'-O-methyl ribonucleotide
  modified_base 17: mod_base = OTHER; note = 2'-fluoro ribonucleotide
  modified_base 18..19: mod_base = OTHER; note = 2'-O-methyl ribonucleotide
  modified_base 1..3: mod_base = OTHER; note = phosphorothioate linkage
gtcgcatctcagtgcagga

SEQ ID NO: 2303 - RNA, 21 nt, synthetic construct
  source 1..21: mol_type = other RNA
  modified_base 1: mod_base = OTHER; note = 2'-O methyl vinyl phosphonate uridine
  modified_base 2: mod_base = OTHER; note = 2'-fluoro ribonucleotide
  modified_base 3: mod_base = OTHER; note = 2'-O-methyl ribonucleotide
  modified_base 4: mod_base = OTHER; note = 2'-fluoro ribonucleotide
  modified_base 5: mod_base = OTHER; note = 2'-O-methyl ribonucleotide
  modified_base 6..8: mod_base = OTHER; note = 2'-fluoro ribonucleotide
  modified_base 9: mod_base = OTHER; note = 2'-O-methyl ribonucleotide
  modified_base 10: mod_base = OTHER; note = 2'-fluoro ribonucleotide
  modified_base 11..13: mod_base = OTHER; note = 2'-O-methyl ribonucleotide
  modified_base 14: mod_base = OTHER; note = 2'-fluoro ribonucleotide
  modified_base 15: mod_base = OTHER; note = 2'-O-methyl ribonucleotide
  modified_base 16: mod_base = OTHER; note = 2'-fluoro ribonucleotide
  modified_base 17: mod_base = OTHER; note = 2'-O-methyl ribonucleotide
  modified_base 18: mod_base = OTHER; note = 2'-fluoro ribonucleotide
  modified_base 19: mod_base = OTHER; note = 2'-O-methyl ribonucleotide
  modified_base 20: mod_base = OTHER; note = 2'-fluoro ribonucleotide
  modified_base 21: mod_base = OTHER; note = 2'-O-methyl ribonucleotide
  modified_base 1..3: mod_base = OTHER; note = phosphorothioate linkage
  modified_base 19..21: mod_base = OTHER; note = phosphorothioate linkage
tcctgcactgagatgcgactt

SEQ ID NO: 2304 - RNA, 19 nt, synthetic construct
  source 1..19: mol_type = other RNA
  modified_base 1: mod_base = OTHER; note = 2'-fluoro ribonucleotide
  modified_base 2: mod_base = OTHER; note = 2'-O-methyl ribonucleotide
  modified_base 3: mod_base = OTHER; note = 2'-fluoro ribonucleotide
  modified_base 4: mod_base = OTHER; note = 2'-O-methyl ribonucleotide
  modified_base 5: mod_base = OTHER; note = 2'-fluoro ribonucleotide
  modified_base 6: mod_base = OTHER; note = 2'-O-methyl ribonucleotide
  modified_base 7: mod_base = OTHER; note = 2'-fluoro ribonucleotide
  modified_base 8: mod_base = OTHER; note = 2'-O-methyl ribonucleotide
  modified_base 9: mod_base = OTHER; note = 2'-fluoro ribonucleotide
  modified_base 10: mod_base = OTHER; note = 2'-O-methyl ribonucleotide
  modified_base 11: mod_base = OTHER; note = 2'-fluoro ribonucleotide
  modified_base 12: mod_base = OTHER; note = 2'-O-methyl ribonucleotide
  modified_base 13: mod_base = OTHER; note = 2'-fluoro ribonucleotide
  modified_base 14: mod_base = OTHER; note = 2'-O-methyl ribonucleotide
  modified_base 15: mod_base = OTHER; note = 2'-fluoro ribonucleotide
  modified_base 16: mod_base = OTHER; note = 2'-O-methyl ribonucleotide
  modified_base 17: mod_base = OTHER; note = 2'-fluoro ribonucleotide
  modified_base 18: mod_base = OTHER; note = 2'-O-methyl ribonucleotide
  modified_base 19: mod_base = OTHER; note = 2'-fluoro ribonucleotide
  modified_base 1..3: mod_base = OTHER; note = phosphorothioate linkage
gtcgcatctcagtgcagga

SEQ ID NO: 2305 - RNA, 21 nt, synthetic construct
  source 1..21: mol_type = other RNA
  modified_base 1: mod_base = OTHER; note = 2'-O methyl vinyl phosphonate uridine
  modified_base 2: mod_base = OTHER; note = 2'-fluoro ribonucleotide
  modified_base 3: mod_base = OTHER; note = 2'-O-methyl ribonucleotide
  modified_base 4: mod_base = OTHER; note = 2'-fluoro ribonucleotide
  modified_base 5: mod_base = OTHER; note = 2'-O-methyl ribonucleotide
  modified_base 6: mod_base = OTHER; note = 2'-fluoro ribonucleotide
  modified_base 7: mod_base = OTHER; note = 2'-O-methyl ribonucleotide
  modified_base 8: mod_base = OTHER; note = 2'-fluoro ribonucleotide
  modified_base 9: mod_base = OTHER; note = 2'-O-methyl ribonucleotide
  modified_base 10: mod_base = OTHER; note = 2'-fluoro ribonucleotide
  modified_base 11: mod_base = OTHER; note = 2'-O-methyl ribonucleotide
  modified_base 12: mod_base = OTHER; note = 2'-fluoro ribonucleotide
  modified_base 13: mod_base = OTHER; note = 2'-O-methyl ribonucleotide
  modified_base 14: mod_base = OTHER; note = 2'-fluoro ribonucleotide
  modified_base 15: mod_base = OTHER; note = 2'-O-methyl ribonucleotide
  modified_base 16: mod_base = OTHER; note = 2'-fluoro ribonucleotide
  modified_base 17: mod_base = OTHER; note = 2'-O-methyl ribonucleotide
  modified_base 18: mod_base = OTHER; note = 2'-fluoro ribonucleotide
  modified_base 19..21: mod_base = OTHER; note = 2'-O-methyl ribonucleotide
  modified_base 1..3: mod_base = OTHER; note = phosphorothioate linkage
  modified_base 19..21: mod_base = OTHER; note = phosphorothioate linkage
tcctgcactgagatgcgactt

SEQ ID NO: 2306 - RNA, 19 nt, synthetic construct
  source 1..19: mol_type = other RNA
gtcgcatctcagtgcagga

SEQ ID NO: 2307 - RNA, 21 nt, synthetic construct
  source 1..21: mol_type = other RNA
tcctgcactgagatgcgactt

SEQ ID NO: 2308 - RNA, 19 nt, synthetic construct
  source 1..19: mol_type = other RNA
gtcgcatctcagtgcagga

SEQ ID NO: 2309 - RNA, 21 nt, synthetic construct
  source 1..21: mol_type = other RNA
tcctgcactgagatgcgactt

SEQ ID NO: 2310 - protein, 89 aa, synthetic construct
LPAPKNLVVSRVTEDSARLSWTAPDAAFDSFYIAYAEPRPDGEAILLQVPGSCRSYDLTGLKPGTEYSVLIHGVKGGLLSSPLTAIFTT

SEQ ID NO: 2311 - protein, 89 aa, synthetic construct; identical to SEQ ID NO: 1

1. A composition comprising an siRNA molecule comprising a sense strand and antisense strand that targets CD40 gene, wherein:
the sense strand comprises the nucleic acid sequence of SEQ ID NO: 1890 and the antisense strand comprises the nucleic acid sequence of SEQ ID NO: 2290;
the sense strand comprises the nucleic acid sequence of SEQ ID NO: 1893 and the antisense strand comprises the nucleic acid sequence of SEQ ID NO: 2293;
the sense strand comprises the nucleic acid sequence of SEQ ID NO: 1941 and the antisense strand comprises the nucleic acid sequence of SEQ ID NO: 2051;
the sense strand comprises the nucleic acid sequence of SEQ ID NO: 1942 and the antisense strand comprises the nucleic acid sequence of SEQ ID NO: 2052;
the sense strand comprises the nucleic acid sequence of SEQ ID NO: 1944 and the antisense strand comprises the nucleic acid sequence of SEQ ID NO: 2054;
the sense strand comprises the nucleic acid sequence of SEQ ID NO: 2110, or a modified version thereof, and the antisense strand comprises the nucleic acid sequence of SEQ ID NO: 2220, or a modified version thereof;
the sense strand comprises the nucleic acid sequence of SEQ ID NO: 2113, or a modified version thereof, and the antisense strand comprises the nucleic acid sequence of SEQ ID NO: 2223, or a modified version thereof;
the sense strand comprises the nucleic acid sequence of SEQ ID NO: 2111, or a modified version thereof, and the antisense strand comprises the nucleic acid sequence of SEQ ID NO: 2221, or a modified version thereof; or
the sense strand comprises a nucleic acid sequence selected from any one of SEQ ID NOs: 46-178, 312-331, 352-356, 673-805, 939-958, 1850, 1851, 1891, 1892, 1894-1928, 1932-1940, 1943, 1945-1959, 2070, 2071, 2110-2148, 2152-2179, 2298, 2300, 2302, 2304, 2306, and 2308, or a modified version thereof, and the antisense strand comprises a nucleic acid sequence selected from any one of SEQ ID NOs: 179-311, 332-351, 356-359, 806-938, 959-978, 1960, 1961, 2000-2038, 2042-2069, 2180, 2181, 2220-2258, 2262-2297, 2299, 2301, 2303, 2305, 2307, and 2309, or a modified version thereof.

2. The composition of claim 1, wherein the siRNA molecule further comprises a linker covalently attached to the sense strand or the antisense strand.

3. The composition of claim 2, wherein the linker is attached to a 5′ end or a 3′ end of the sense strand or the antisense strand.

4. The composition of claim 1, wherein the siRNA molecule further comprises a vinyl phosphonate modification on the sense strand or the antisense strand.

5. The composition of claim 4, wherein the vinyl phosphonate modification is attached to a 5′ end or a 3′ end of the sense strand or the antisense strand.

6.-9. (canceled)

10. The composition of claim 1, wherein the siRNA molecule has the formula as illustrated in Formula III:
(III)
N₁N₂N₃N₄N₅N₆N₇N₈N₉N₁₀N₁₁N₁₂N₁₃
N₁₄N₁₅N₁₆N₁₇N₁₈N₁₉
Sense-strand (SS)
N₂₁N₂₀N₁₉N₁₈N₁₇N₁₆N₁₅N₁₄N₁₃N₁₂
N₁₁N₁₀N₉N₈N₇N₆N₅N₄N₃N₂N₁
Antisense-strand (AS),
wherein each nucleotide represented by N, is as set forth in SEQ ID NO: 2110 and SEQ ID NO: 2220, SEQ ID NO: 2113 and SEQ ID NO: 2223, SEQ ID NO: 2111 and SEQ ID NO: 2221, or comprising a modified nucleotide base thereof.

11. The composition of claim 10, wherein the sense strand comprises a 2′-fluoro modified nucleotide at N3, N7, N8, N9, N12, and N17, and a 2′O-methyl modified nucleotide at N1, N2, N4, N5, N6, N10, N11, N13, N14, N15, N16, N18, and N19.

12. The composition of claim 10, wherein the antisense strand comprises a vinyl phosphonate moiety with a phosphorothioate (PS) modified backbone attached at N1, a 2′fluoro-modified nucleotide with a PS-modified backbone at N2, a 2′O-methyl modified nucleotide at N3, N4, N5, N6, N7, N8, N9, N10, N11, N12, N13, N15, N16, N17, N18, and N19, a 2′fluoro-modified nucleotide at N14, and a 2′O-methyl modified nucleotide with a PS-modified backbone at N20 and N21.

13. The composition of claim 10, wherein the antisense strand comprises a vinyl phosphonate moiety attached to N1.

14. The composition of claim 10, wherein the siRNA molecule is conjugated to a linker as shown in the following formula:

[chemical structure]

15. The composition of claim 1, wherein the siRNA molecule has a formula as shown in the following formulas: [chemical structure]
wherein F1 is a polypeptide comprising at least one FN3 domain.

16. The composition of claim 1, further comprising one or more FN3 domains conjugated to the siRNA molecule.

17. The composition of claim 16, wherein the one or more FN3 domains comprises an FN3 domain conjugated to the siRNA molecule through a cysteine in the FN3 domain.

18. The composition of claim 16, wherein the one or more FN3 domains comprises an FN3 domain that binds to CD71.

19. The composition of claim 18, wherein the FN3 domain that binds to CD71 comprises an amino acid sequence that is at least 87%, 88%, 89%, 90%, 91%, 92%, 93%, 94%, 95%, 96%, 97%, 98%, 99% identical to, or is identical to, a sequence selected from any one of SEQ ID NOs: 570, 672, 1848, 1773, 1849, 1767, 360-569, 571-644, 663-671, 1395-1766, 1768-1772, 1774-1847, and 2310.

20. The composition of claim 18, wherein the FN3 domain comprises an amino acid sequence that is at least 95% identical to the amino acid sequence of SEQ ID NO: 570, or SEQ ID NO: 672, SEQ ID NO: 1848, SEQ ID NO: 1773, SEQ ID NO: 1849, or SEQ ID NO: 1767.

21. The composition of claim 18, wherein the FN3 domain comprises an amino acid sequence that comprises the amino acid sequence of SEQ ID NO: 570, SEQ ID NO: 672, SEQ ID NO: 1848, SEQ ID NO: 1773, SEQ ID NO: 1849, or SEQ ID NO: 1767.

22. (canceled)

23. A pharmaceutical composition comprising the composition of claim 1.

24. A kit comprising the composition of claim 1.

25. A method of treating an immunological disease in a subject in need thereof, the method comprising administering to the subject the composition of claim 1.

26.-41. (canceled)
